(19) United States
(12) Patent Application Publication
(10) Pub. No.: US 2011/0097360 A1
(43) Pub. Date: Apr. 28, 2011

(54) STREPTOCOCCUS PNEUMONIAE PILUS ANTIGENS

(76) Inventors: Claudio Donati, Poggibonsi (IT); Vega Masignani, Siena (IT); Marirosa Mora, Siena (IT); Monica Moschioni, Colle Val D' Elsa (IT)

(21) Appl. No.: 12/451,736

(22) PCT Filed: May 23, 2008
(86) PCT No.: PCT/IB2008/002108

§ 371 Date: May 16, 2010

Related U.S. Application Data
(60) Provisional application No. 60/940,167, filed on May 25, 2007.

(51) Int. Cl. A61K 39/09; C07K 2/00; C12N 9/00; C07K 14/315; C07K 4/04; C07H 21/00; C07H 21/04; C12N 1/20; A61P 37/04; A61P 31/04

(52) U.S. Cl. 424/242.1; 530/350; 435/183; 530/324; 530/326; 536/23.7; 536/23.1; 424/244.1; 435/253.4

(57) ABSTRACT

Polypeptides from Streptococcus pneumoniae are described. In some aspects the polypeptides include pili polypeptides from a second pili island (pilus II island (INV1 04B)) identified in Streptococcus pneumoniae isolate INV1 04. In other aspects the polypeptides include pili polypeptides and non-pilus polypeptides from Streptococcus pneumoniae strains 23F, INV200, and OXC141 that are absent from Streptococcus pneumoniae isolate INV104. The polypeptides, including fragments and variants thereof, may be used in immunogenic compositions for prophylactic or therapeutic immunization against Streptococcus pneumoniae. The polypeptides are also disclosed to be used in compositions useful for the production of antibodies and immunostimulants. Also presented are methods of inhibiting Streptococcus pneumoniae, methods of treating Streptococcus pneumoniae infection, methods of identifying inhibitors of Streptococcus pneumoniae and methods for diagnosing/detecting Streptococcus pneumoniae infection.

### FIELD

[0001] This invention relates to polypeptides, including pili proteins, from Streptococcus pneumoniae (S. pneumoniae), including fragments and variants thereof, and methods of their use in the treatment of and immunization against S. pneumoniae infections.

### BACKGROUND

[0002] The Gram-positive bacterium Streptococcus pneumoniae (also known as Spn or pneumococcus) is a major cause of morbidity and mortality world-wide and represents one of the four major infectious disease killers, together with HIV, malaria, and tuberculosis (Bruyn, G. A. W. & van Furth, R. (1991) Eur. J. Clin. Microbiol. Infect. Dis. 10, 897-910; Ryan, M. W. & Antonelli, P. J. (2000) Laryngoscope 110, 961-964; Cutts, F. T., Zaman, S. M., Enwere, G., Jaffar, S., Levine, O, S., Okoko, C. Oluwalana, A., Vaughan, S., Obaro, A., Leach, A., et al. (2005) Lancet 365, 1139-1146; Swiatlo, E., Champlin, F. R., Holman, S. C., Wilson, W. W.&Watt, J. M. (2002) Infect. Immun. 70, 412-415; Sandgren, A., Albiger, B., Orihuela, C., Tuomanen, E., Normark, S. & Henriques-Normark, B. (2005) J. Infect. Dis. 192, 791-800). It is a main cause of respiratory tract infections such as otitis media, sinusitis, and community acquired pneumonia, but also an important pathogen in invasive diseases such as septicemia and meningitis. Even though pneumococcus is a devastating pathogen, it also harmlessly colonizes healthy children attending day-care centers to a high extent (Henriques Normark, B., Christensson, B., Sandgren, A., Noreen, B., Sylvan, S., Burman, L. G. & Olsson-Liljequist, B. (2003) Microb. Drug Resist. 9, 337-344; Nunes, S., Sá-Leão, R., Carriço, J., Alves, C. R., Mato, R., Avô, A. B., Saldanha, J., Almeida, J. S., Sanches, I. S. & de Lencastre, H. (2005) J. Clin. Microbiol. 43, 1285-1293). A major virulence factor in pneumococcal disease is the polysaccharide capsule, by which pneumococci are grouped into at least ninety different serotypes (Henrichsen, J. (1995) J. Clin. Microbiol. 33, 2759-2762). Other genetic factors, such as CbpA (choline-binding protein A) and pneumolysin, have been described to be of importance for virulence (Lau, G. W., Haataja, S., Lonetto, M., Kensit, S. E., Marra, A., Bryant, A. P., McDevitt, D., Morrison, D. A. & Holden, D. W. (2001) Mol. Microbiol. 40, 555-571; Rosenow, C., Ryan, P., Weiser, J. N., Johnson, S., Fontan, P., Ortqvist, A. & Masure, H. R. (1997) Mol. Microbiol. 25, 819-829; Tuomanen, E. (1999) Current Opin. Biol. 2, 35-39).

[0003] Infection by S. pneumoniae leads to invasive disease triggered by initial colonization of the nasopharynx, but the mechanisms of adhesion are not well understood. In vitro adhesion of encapsulated pneumococci is much lower than for nonencapsulated nonvirulent derivatives (Swiatlo, E., Champlin, F. R., Holman, S. C., Wilson, W. W.&Watt, J. M. (2002) Infect. Immun. 70, 412-415), even though capsule expression is essential for successful colonization of the upper airways. These observations suggest that in vivo, pneumococci are adhesive despite the production of a thick capsule (Sandgren, A., Albiger, B., Orihuela, C., Tuomanen, E., Normark, S. & Henriques-Normark, B. (2005) J. Infect. Dis. 192, 791-800).

[0004] In other Gram-positive bacteria, such as Corynebacterium diphtheriae (Ton-That, H., Marraffini, L. A. & Schneewind, O. (2004) Mol. Microbiol. 53, 251-261; Ton-That, H. & Schneewind, O. (2003) Mol. Microbiol. 50, 1429-1438), Actinomyces spp. (Kelstrup, J., Theilade, J. & Fejerskov, O. (1979) Scand. J. Dent. Res. 87, 415-423), and recently group A streptococci (GAS) and group B streptococci (GBS) (Mora, M., Bensi, G., Capo, S., Falugi, F., Zingaretti, C., Manetti, A. G. O., Maggi, T., Taddei, A. R., Grandi, G. & Telford, J. L. (2005) Proc. Natl. Acad. Sci. USA 102, 15641-15646; Lauer, P., Rinaudo, C. D., Soriani, M., Margarit, I., Mainone, D., Rosini, R., Taddei, A. R., Mora, M., Rappuoli, R., Grandi, G. & Telford, J. L. (2005) Science 309, 105), pili-like surface structures have been identified by electron microscopy and characterized genetically as well as biochemically (Ton-That, H., Marraffini, L. A. & Schneewind, O. (2004) Mol. Microbiol. 53, 251-261; Ton-That, H. & Schneewind, O. (2003) Mol. Microbiol. 50, 1429-1438; Mora, M., Bensi, G., Capo, S., Falugi, F., Zingaretti, C., Manetti, A. G. O., Maggi, T., Taddei, A. R., Grandi, G. & Telford, J. L. (2005) Proc. Natl. Acad. Sci. USA 102, 15641-15646; Lauer, P., Rinaudo, C. D., Soriani, M., Margarit, I., Mainone, D., Rosini, R., Taddei, A. R., Mora, M., Rappuoli, R., Grandi, G. & Telford, J. L. (2005) Science 309, 105). In Actinomyces spp. type 1 fimbrial genes mediate adhesion to dental and mucosal surfaces (Li, T., Khah, M. K., Slavnic, S., Johansson, I. & Stromberg, N. (2001) Infect Immun. 69, 7224-7233). However, there is a need for functional data on the physiological role and function in infectious disease of pili and other antigens in pathogenic Streptococcus spp.

[0005] Gram-positive pili are extended polymers formed by a transpeptidase reaction involving covalent cross-linking of subunit proteins containing specific amino acid motifs, which are assembled by specific sortases. Sortases are also responsible for covalent attachment of the pilus to the peptidoglycan cell wall.

### SUMMARY

[0006] The present disclosure describes polypeptides from Streptococcus pneumoniae. In some aspects the polypeptides described herein include pili peptides from S. pneumoniae. In other aspects, other polypeptides from S. pneumoniae are described. The Streptococcus pneumoniae polypeptides described herein are useful in methods of treatment for and immunization against S. pneumoniae infections.

[0007] In some aspects, the disclosure features pili polypeptides from a second pili island identified in Streptococcus pneumoniae INV104B (pilus II island (INV104B)). In other aspects, the disclosure features pili polypeptides identified in S. pneumoniae 23F, INV200, and OXC141. The pili are thought to play a role in the pathogenesis of S. pneumoniae.

[0008] In some aspects, the disclosure features isolated pilus encoded by the Streptococcus pneumoniae pilus II island (INV104B). In some embodiments, the pilus includes a sortase. In some embodiments, the pilus includes an LPXTG cell wall anchored protein, e.g., a polypeptide having the amino acid sequence of SEQ ID NO:2, 4 and/or 6, or a processed form thereof.

[0009] In some embodiments, the pili are separated from cells by enzymatic digestion (e.g., with one or more enzymes such as peptidoglycan hydrolases (e.g., mutanolysin, lysostaphin, and lysozyme)). In some embodiments, the pili are separated from cells by mechanical shearing (e.g., by ultrasonication). In some embodiments, the pili are substantially free of bacterial cells. In some embodiments, the disclosure features methods of producing the pilus (e.g., S. pneumoniae pili), wherein the methods include subjecting a bacterial cell that produces the pilus to enzymatic digestion or mechanical shearing and isolating the pilus from the cell.

[0010] In other aspects, the disclosure features immunogenic compositions including more or more of the isolated pili (e.g., S. pneumoniae pili).

[0011] In other aspects, the disclosure features an isolated Streptococcus pneumoniae sortase, wherein the sortase is one of SEQ ID NO:282, SEQ ID NO:1386, SEQ ID NO:676, or SEQ ID NO:1123.

[0012] In other aspects, the disclosure features an isolated Streptococcus pneumoniae LPXTG cell wall anchored protein, wherein the LPXTG cell wall anchored protein is one of SEQ ID NO:2, SEQ ID NO:4, SEQ ID NO:6, SEQ ID NO:7, SEQ ID NO:8, or SEQ ID NO:9.

[0013] In further aspects, the disclosure features methods of isolating pili encoded by the Streptococcus pneumoniae pilus II island (INV104B), wherein the methods include subjecting bacterial cells that produce pili encoded by the Streptococcus pneumoniae pilus II island (INV104B) to enzymatic digestion (e.g., mutanolysin) or mechanical shearing (e.g., ultrasonication) and isolating the pili from the cells. In some embodiments, isolating includes a density gradient centrifugation. In some embodiments, isolating includes reduction of polydispersity, such as separating components by size, e.g., using gel filtration chromatography.

[0014] In other aspects, the disclosure features antibodies that bind specifically to a pilus encoded by the Streptococcus pneumoniae pilus II island (INV104B). In some embodiments, the antibody is a monoclonal antibody, a polyclonal antibody, a chimeric antibody, a human antibody, a humanized antibody, a single-chain antibody, or a Fab fragment.

[0015] In other aspects, the disclosure features an immunogenic composition comprising a purified Streptococcus pneumoniae pilus II island (INV104B) polypeptide in oligomeric form. In some embodiments, the polypeptide is a hyperoligomer. In other embodiments, the polypeptide is a fragment of a LPXTG cell wall anchored protein encoded by the Streptococcus pneumoniae pilus II island (INV104B).

[0016] In further aspects, the disclosure features methods of inducing an immune response against Streptococcus pneumoniae. In some embodiments, the methods comprise administering an effective amount of pili encoded by the Streptococcus pneumoniae pilus II island (INV104B) to a subject.

[0017] In other aspects, the disclosure features methods of detecting a Streptococcus pneumoniae infection in a subject. In some embodiments, the methods comprise assaying a sample from the subject for the presence of an antibody to pili encoded by the Streptococcus pneumoniae pilus II island (INV104B).

[0018] In other aspects, the disclosure features methods of detecting a Streptococcus pneumoniae infection in a subject. In some embodiments, the methods comprise contacting a sample with an antibody and detecting binding of the antibody to a component of the sample. In some embodiments, the antibody binds to a pili component. In other embodiments, the antibody binds to a pili complex.

[0019] In other aspects, the disclosure features methods of treating a subject having a Streptococcus pneumoniae infection. In some embodiments, the methods comprise administering to the subject an effective amount of an agent that binds specifically to pili encoded by the Streptococcus pneumoniae pilus II island (INV104B). In some embodiments, the agent is an antibody. In some embodiments, the antibody blocks attachment of Streptococcus pneumoniae to cells. In some embodiments, the antibody specifically binds to one or more LPXTG cell wall anchored proteins encoded by the Streptococcus pneumoniae pilus II island (INV104B).

[0020] In other aspects, the disclosure features methods of determining the course of treatment for a subject having a Streptococcus pneumoniae infection. In some embodiments, the method comprises assaying a sample from the subject for the presence of an antibody to pili encoded by the Streptococcus pneumoniae pilus II island (INV104B), and administering to the subject an anti-inflammatory agent if the presence of the antibody is detected. In other embodiments, the method comprises assaying a sample from the subject for the presence of an antibody to pili encoded by the Streptococcus pneumoniae pilus II island (INV104B), and administering to the subject an antibiotic agent if the presence of the antibody is not detected.

[0021] In other aspects, the disclosure features isolated pilus or pilus-like multimers that comprise an amino acid sequence of a pilus protein encoded by the Streptococcus pneumoniae pilus II island (INV104B) that has up to 30 amino acid substitutions, insertions, or deletions. In some embodiments, the amino acid sequence has up to 20 amino acid substitutions, insertions, or deletions. In other embodiments, the amino acid sequence has up to 10 amino acid substitutions, insertions, or deletions. In still other embodiments, amino acid sequence has up to 5 amino acid substitutions, insertions, or deletions.

[0022] In further aspects, the disclosure features polypeptides that have the amino acid sequence of one or more LPXTG cell wall anchored proteins encoded by the Streptococcus pneumoniae pilus II island (INV104B). In other aspects, the disclosure features immunogenic fragments of one or more LPXTG cell wall anchored proteins encoded by the Streptococcus pneumoniae pilus II island (INV104B). In other aspects, the disclosure features polynucleotides that encode polypeptides that have the amino acid sequence of one or more LPXTG cell wall anchored proteins encoded by the Streptococcus pneumoniae pilus II island (INV104B).

[0023] In other aspects, the disclosure features purified polypeptides with the amino acid sequence of SEQ ID NO:2, 4, 6, 7, 8, and 9. In other aspects, the disclosure features purified polypeptides having ten consecutive residues of SEQ ID NO:2, 4, 6, 7, 8, and 9. In still other aspects, the disclosure features purified polypeptides with amino acid sequences at least 85% identical to SEQ ID NO:2, 4, 6, 7, 8, and 9.

[0024] In additional aspects, the disclosure features purified polypeptides with at least 85% sequence identity to a sequence selected from the group consisting of SEQ ID NO:29 through SEQ ID NO:1742, or immunogenic fragments thereof. In other aspects, the disclosure features purified polypeptides with an amino acid sequence selected from the group consisting of SEQ ID NO:29 through SEQ ID NO:1742, or immunogenic fragments thereof.

[0025] In some embodiments, the disclosure features purified OCX141 polypeptides with at least 85% sequence identity to a sequence selected from the group SEQ ID NO: 53, SEQ ID NO: 65, SEQ ID NO: 70, SEQ ID NO: 99, SEQ ID NO: 104, SEQ ID NO: 117, SEQ ID NO: 135, SEQ ID NO: 177, SEQ ID NO: 178, SEQ ID NO: 198, SEQ ID NO: 235, SEQ ID NO: 236, SEQ ID NO: 237, SEQ ID NO: 242, SEQ ID NO: 247, SEQ ID NO: 248, SEQ ID NO: 250, SEQ ID NO: 251, SEQ ID NO: 252, SEQ ID NO: 253, SEQ ID NO: 433, SEQ ID NO: 439, SEQ ID NO: 444, SEQ ID NO: 538, SEQ ID NO: 539, SEQ ID NO: 540, SEQ ID NO: 541, SEQ ID NO: 542, SEQ ID NO: 543, SEQ ID NO: 544, SEQ ID NO: 545, SEQ ID NO: 581, or SEQ ID NO: 593, and immunogenic fragments thereof.

[0026] In other embodiments, the disclosure features purified INV200 polypeptides with at least 85% sequence identity to a sequence selected from the group SEQ ID NO: 626, SEQ ID NO: 628, SEQ ID NO: 629, SEQ ID NO: 630, SEQ ID NO: 631, SEQ ID NO: 632, SEQ ID NO: 639, SEQ ID NO: 645, SEQ ID NO: 747, SEQ ID NO: 751, SEQ ID NO: 752, SEQ ID NO: 783, SEQ ID NO: 786, SEQ ID NO: 787, SEQ ID NO: 810, SEQ ID NO: 812, SEQ ID NO: 813, SEQ ID NO: 824, SEQ ID NO: 831, SEQ ID NO: 842, SEQ ID NO: 847, SEQ ID NO: 875, SEQ ID NO: 876, SEQ ID NO: 879, SEQ ID NO: 880, SEQ ID NO: 882, SEQ ID NO: 913, SEQ ID NO: 914, SEQ ID NO: 925, SEQ ID NO: 926, SEQ ID NO: 947, SEQ ID NO: 948, SEQ ID NO: 968, SEQ ID NO: 987, SEQ ID NO: 988, SEQ ID NO: 990, SEQ ID NO: 992, SEQ ID NO: 1003, SEQ ID NO: 1007, SEQ ID NO: 1008, SEQ ID NO: 1036, SEQ ID NO: 1082, SEQ ID NO: 1120, or SEQ ID NO: 1123, and immunogenic fragments thereof.

[0027] In further embodiments, the disclosure features purified 23F polypeptides with at least 85% sequence identity to a sequence selected from the group SEQ ID NO: 1297, SEQ ID NO: 1309, SEQ ID NO: 1311, SEQ ID NO: 1343, SEQ ID NO: 1362, SEQ ID NO: 1364, SEQ ID NO: 1434, SEQ ID NO: 1451, SEQ ID NO: 1455, SEQ ID NO: 1466, SEQ ID NO: 14678, SEQ ID NO: 1470, SEQ ID NO: 1474, SEQ ID NO: 1484, SEQ ID NO: 1485, SEQ ID NO: 1486, SEQ ID NO: 1487, or SEQ ID NO: 1491, and immunogenic fragments thereof.

[0028] In other aspects, the disclosure features immunogenic fragments of an LPXTG cell wall anchored protein encoded by the Streptococcus pneumoniae pilus II island (INV104B).

[0029] In further aspects, the disclosure features isolated nucleic acids with the polynucleotide sequence of SEQ ID NO:1, 3, and 5. In other aspects, the disclosure features isolated nucleic acids that hybridize under stringent conditions to a hybridization probe, wherein the probe has the polynucleotide sequence of SEQ ID NO:1, 3, and 5 or the complement of SEQ ID NO:1, 3, and 5. In still other aspects, the disclosure features an isolated nucleic acid having a sequence that encodes an amino acid sequence that is at least 85% identical to SEQ ID NO:2, 4, 6, 7, 8, and 9.

[0030] In other aspects, the disclosure features isolated nucleic acids having a sequence that encodes an amino acid sequence that is at least 85% identical to a sequence selected from the group consisting of SEQ ID NO: 29 though SEQ ID NO:1742. In other aspects, the disclosure features isolated nucleic acids having a sequence that encodes an amino acid sequence that is selected from the group consisting of SEQ ID NO: 29 though SEQ ID NO:1742.

[0031] In other aspects, the disclosure features methods of inducing an immune response against Streptococcus pneumoniae. In some embodiments, the methods include administering an effective amount of an immunogenic fragment of a LPXTG cell wall anchored protein encoded by the Streptococcus pneumoniae pilus II island (INV104B) to a subject. In some embodiments, the subject is a human.

[0032] In other aspects, the disclosure features an antibody to a pilus protein encoded by the Streptococcus pneumoniae pilus II island (INV104B) in a cell. In some embodiments, the methods include expressing a nucleic acid encoding the antibody to the pilus protein encoded by the Streptococcus pneumoniae pilus II island (INV104B) in the cell. In some embodiments, the pilus protein is a LPXTG cell wall anchored protein.

[0033] In still other aspects, the disclosure features methods of purifying Streptococcus pneumoniae from a sample comprising Streptococcus pneumoniae. These methods include: providing an affinity matrix comprising an antibody bound to a solid support; contacting the sample with the affinity matrix to form an affinity matrix-Streptococcus pneumoniae complex; separating the affinity matrix-Streptococcus pneumoniae complex from the remainder of the sample; and releasing Streptococcus pneumoniae from the affinity matrix.

[0034] In further aspects, the disclosure features methods of delivering a cytotoxic agent or a diagnostic agent to Streptococcus pneumoniae. These methods include: providing the cytotoxic agent or the diagnostic agent conjugated to an antibody or fragment thereof; and exposing the Streptococcus pneumoniae to the antibody-agent or fragment-agent conjugate.

[0035] In other aspects, the disclosure features methods of identifying a binding modulator for pili encoded by the Streptococcus pneumoniae pilus II island (INV104B). These methods include contacting an animal cell susceptible to Streptococcus pneumoniae pili binding with a candidate compound and a bacterial cell having pili encoded by the Streptococcus pneumoniae pilus II island (INV104B), and determining whether binding of the bacterial cell to the animal cell is inhibited. In some embodiments, inhibition of the binding activity is indicative of an inhibitor of binding by pili encoded by the Streptococcus pneumoniae pilus II island (INV104B).

[0036] In other aspects, the disclosure features methods of identifying binding modulators to the activities of pili encoded by the Streptococcus pneumoniae pilus II island (INV104B). These methods include contacting an cell susceptible to Streptococcus pneumoniae pili binding with a candidate compound and a pili encoded by the Streptococcus pneumoniae pilus II island (INV104B), and determining whether binding of the pili to the cell is inhibited. In some embodiments, inhibition of binding activity is indicative of an inhibitor of binding by pili encoded by the Streptococcus pneumoniae pilus II island (INV104B).

[0037] In further aspects, the disclosure features methods of identifying a binding modulator for pili encoded by the Streptococcus pneumoniae pilus II island (INV104B). These methods include contacting an cell susceptible to Streptococcus pneumoniae pili binding with a candidate compound and a pilus protein or cell binding fragment thereof encoded by the Streptococcus pneumoniae pilus II island (INV104B), and determining whether binding of the pilus protein or cell binding fragment thereof to the cell is inhibited. In some embodiments, inhibition of binding activity is indicative of an inhibitor of binding by pili encoded by the Streptococcus pneumoniae pilus II island (INV104B).

[0038] In still other aspects, the disclosure features methods of isolating pili encoded by the Streptococcus pneumoniae pilus II island (INV104B). These methods include subjecting Streptococcus pneumoniae cells that produce pili encoded by the Streptococcus pneumoniae pilus II island (INV104B) to ultrasonication or digestion with a lytic enzyme; separating non-cellular components by density gradient centrifugation; and isolating pili encoded by the Streptococcus pneumoniae pilus II island (INV104B). In some embodiments, the lytic enzyme is mutanolysin. In other embodiments, the Streptococcus pneumoniae cells that produce pili encoded by the Streptococcus pneumoniae pilus II island (INV104B) are Streptococcus pneumoniae TIGR4 cells

[0039] Unless otherwise defined, all technical and scientific terms used herein have the same meaning as commonly understood by one of ordinary skill in the art. Although methods and materials similar or equivalent to those described herein can be used in the practice or testing of the present invention, suitable methods and materials are described below. In case of conflict, the present specification, including definitions, will control. In addition, the materials, methods, and examples are illustrative only and not intended to be limiting.

[0040] The details of one or more embodiments of the invention are set forth in the accompanying figures and the description below. Other features, objects, and advantages of the invention will be apparent from the description and figures, and from the additional embodiments below.

### BRIEF DESCRIPTION OF THE FIGURES

[0041] FIG. 1. is a diagram showing the S. pneumoniae pilus II island (INV104B).

### DESCRIPTION

[0042] The Applicants have identified new polypeptide sequences from Streptococcus pneumoniae (also known as pneumococcus), including new pili polypeptides and other polypeptides useful as antigens. New pili polypeptide sequences were identified in the unfinished genome sequence for S. pneumoniae isolate INV104, as sequenced by The Institute for Genomic Research (see worldwide web site “tigr.org”). These pili polypeptide sequences are encoded by a pathogenicity island, referred to herein as the pilus II island (INV104B), which is present in some, but not all, clinical pneumococcal isolates. Pili are important for pneumococcal adherence to lung epithelial cells as well as for colonization. Additionally, the Sanger partial genomes for S. pneumoniae strains 23F, INV200, and OXC141 were analyzed (see worldwide web site “sanger.ac.uk/Projects/Microbes/”) to identify genes encoding polypeptides absent from INV104, the results of which included additional pili polypeptides as well as a large number of other non-INV104 polypeptides. Accordingly, this disclosure features, inter alia, S. pneumoniae pili, pilus, and other polypeptide compositions and the use of the same in methods of treatment for, diagnosis of, and immunization against S. pneumoniae infections. As used herein the term S. pneumoniae Polypeptide(s) is meant to include S. pneumoniae pilus II island (INV104B) pili polypeptides, pili polypeptides from 23F, INV200, and OXC141, and other polypeptides from S. pneumoniae. Also as used herein the term S. pneumoniae Pilus Polypeptide(s) is meant to include S. pneumoniae pilus II island (INV104B) pili polypeptides and pili polypeptides from 23F, INV200, and OXC141.

S. pneumoniae Pili of the Pilus II Island of Inv104B

[0043] Pneumococcal pili encoded by a 6.5 kb insert between genes corresponding to sp1008 and sp1009 of S. pneumoniae isolate INV104B (ST227, serotype 1) of strain TIGR4 (as illustrated by FIG. 1) are described herein. This region of S. pneumoniae isolate INV104B is referred to herein as the “S. pneumoniae pilus II island (INV104B).” The S. pneumoniae pilus II island (INV104B) encodes three LPXTG cell wall anchored proteins (herein referred to as LPXTG-1, LPXTG-1A, and LPXTG-2), a LepA peptidase (orf01289; SEQ ID NO:673), and two predicted sortases (herein referred to as sort-1 (SEQ ID NO:676) and sort-2 (SEQ ID NO: 1123)). See Example 4 for these LepA and sortase sequences.

[0044] An exemplary nucleic acid sequence for LPXTG-1 (orf01290-long) is hereby provided:

(SEQ ID NO: 1)
ATGAACGTTCAATATGATTTTAAGAAGATTCAATATTTTACCAGTAGTTT
AGTTATCTTTCTCGCTATTCTTTTTTTGTGTGCACCAATTAATTCTTTAC
GTGCAGATTCAATAACTGAACCTCAGACAACTCTGCACAAAACGATTACT
CCGATATCAGGGCAAAAAGACCAGTATGAGTTGTCACTGGATATCACATC
TAAACTGGGAACGGAGACCCAGTCAGAACCCTTGGATGTAGTCTTGGTTG
CCGATCTTTCAGGGAGTATGGAAGAGCGAGATGTGTGGTCTTACTCTAGT
AGACGATACATTAGTAGGATTGAAGCACTAAAACATACACTGAAAGGTGT
GAATGGTCGTCAGGGGCTCATTGATACAATTCTTTCTAATTCCCAAAACC
GTCTGTCTATAGTTGGTTTTGCCGGAAAGATTGATAATCAGTATAATGAC
CGTTATTATAATGAATATTATCTGAGTTATCAATATGGAACTTGGCCAAA
TTGAGCTGGTTGGTATTCAAATATCTCTTCATATGATGATGCTAAAACTT
TAGTATCTTGGAGCACGGATTCTAATAGCTCAAAAAATATTGTTAGTTCG
TTAACAATTGCTGACTCTAGTCGTTCTTATGGTATGGACGCGGGCATTGG
CACTGGGACAAATATAAATGCTGGGTTAACTGAAGCTCAAAGATTGTTGC
AAAGTGCAAGGGCTGGGGCAAAAAAAGTAGTTATTCTGCTGTCAGATGGC
GAAGCTAATATGTATTACGAGTCTAATAGTGGGAGAACAATATATAACTA
TTATTCTAATCCAAATGTGGGACGTATGATTGATACTCCATATTGGTTTA
CCTCTGGTTTAGAGAGAGGAATGCTGAATATATCTAGTTTAATAGCTCCA
AAAATAGATGGCTTTTATTCAATCAAATTCAGATATATAGGTTCAAACGA
TAGTATCACATCTCTTAAAGGATATATCAGTGGTTATAATTCTGGAATCC
CCAACGAAATATTTTCTGCCAATAATGAAAATGACTTGCAACAAAAATTC
AAAGAAATCACAGATAAAATTCTACCTCTAGGCGTACACCATGTAACTAT
ATCAGATGTCTTGTCCAAGTACGTGCAGCTGTTACCTGGTGATGCTTCAC
ACCTTCGTGTCGTCAAAATCAAGGATGGTAACGAGCAAGAACTGAATGAC
AATCAAGTTACGATTGAAACTAAGAAGAACGAACAGGGATTAGTGGAAGT
AACAGCCAAGTTTAATCCGAGTTACACTTTGGAGGATGACGCCAAGTACG
TTCTCAAGTTTACTGTCACCTCTAGCCAAGAGGCATTTGATGCGATTGCG
GGTGATAAGACACTTACTAGTGATGATGCCGAAGAAGCCGATGCTACTAA
ACTCTACTCCAACAAGGGGGCAAAAGTTGCCTATTCCTATGGTATTGGGA
CCTCACGTACCAAAATAAAAGACTATTCTGAGAAGCCCACTTTCAAGCCG
TCAGATCCATTGACGGTTCCTGTAGAGATTGAGTGGAAAGGTGTGGATGG
AAAATCAAATCCATCAGCAAATCGTCCACCTAGTGTCGAATTAAACTTAA
ACCAAAAGAAAGATGGAAGTATAAAGGATTCCTATCGAAAGGTCACTAGT
CCAGTTCAAACGAATAGTTTTACTGAAAATACTAGTTTTGCAAAGGTAGC
TAAGGGATATGACTACGAACTGAAAGCACCAGACGCTCCGGGATACACAG
TCGAAGTTCAAAAGACAGGTACGAAAGAGAAACCATCCTTCAAAGTTATT
TACCGACAGCTTCCAAGTCTCACCGTAAAGAAAATCCTAGAAGGTGAACA
ATCACCTAATAAATCTTTCACAATTAATGTTACCTTTTCAGATAAGGATG
GCAAGCCGATTAACGGCAAGTTTGGGAATACAACAGTGACTAACGGGAAA
GCACAGATTTCTCTCAAAAATAGTCAGGAAACTGCCCTCAGTTATCTGCC
TCGTGATACCCACTATAAGGTGGAAGAAGTAGAGAACTCTAGAACGGGAT
ATCATGTCACCTATGAAAAACAAGAGGGGACTTTGTCAGAGGATGTTCAA
ACAATCGTCACCAACCACAGACTTCCGACACTTTCAGTCACAAAAAAAGT
TACAGGTGCTTTTGCTAATCTTCTGCAATCCTTTAAGATTACCATTAACG
TAAAGGATGCGCAAAATAAACCATTGAATGGATCGTATAGTGCAATAGTA
AATAATCAAAAAACAACGCTACAATTCACCAATGGTAAGGCGACAGTTGA
TCTAAAGAAAGATAAAACCATCAAGATTCTCGACCTTCCTCTAAATGCTC
GTTATAGTATCGAAGAAGAAGCAAGTTCGTCTCGTGGGTATCAGGTGTCC
TATGATAAAAAAGAAGGAACTCTTGATGCAAATAAGTCTGCGACAGTCAC
GAATAATAAAAACAGCGTACCTGAAACGGGAATTGACTTCTTGAGTAGCA
CTCTCGTGCTTGGAGTCGTTCTTCCTCTAGGAGGGATCTTCTTTATCATC
TTACTTGGTCACCTTGTGGTGAATAGGAGGAA

[0045] An exemplary amino acid sequence for LPXTG-1 is hereby provided:

(SEQ ID NOs: 769 and 2)
MNVQYDFKKIQYFTSSLVIFLAILFLCAPINSLRADSITEPQTTLHKTIT
PISGQKDQYELSLDITSKLGTETQSEPLDVVLVADLSGSMEERDVWSYSS
RRYISRIEALKHTLKGVNGRQGLIDTILSNSQNRLSIVGFAGKIDNQYND
RYYNEYYLSYQYGTWPN*AGWYSNISSYDDAKTLVSWSTDSNSSKNIVSS
LTIADSSRSYGMDAGIGTGTNINAGLTEAQRLLQSARAGAKKVVILLSDG
EANMYYESNSGRTIYVYYSNPNVGRMIDTPYWFTSGLERGMLNISSLIAP
KIDGFYSIKFRYIGSNDSITSLKGYISGYNSGIPNEIFSANNENDLQQKF
KEITDKILPLGVHHVTISDVLSKYVQLLPGDASHLRVVKIKDGNEQELND
NQVTIETKKNEQGLVEVTAKFNPSYTLEDDAKYVLKFTVTSSQEAFDAIA
GDKTLTSDDAEEADATKLYSNKGAKVAYSYGIGTSRTKIKDYSEKPTFKP
SDPLTVPVEIEWKGVDGKSNPSANRPPSVELNLNQKKDGSIKDSYRKVTS
PVQTNSFTENTSFAKVAKGYDYELKAPDAPGYTVEVQKTGTKEKPSFKVI
YRQLPSLTVKKILEGEQSPNKSFTINVTFSDKDGKPINGKFGNTTVTNGK
AQISLKNSQETALSYLPRDTHYKVEEVENSRTGYHVTYEKQEGTLSEDVQ
TIVTNHRLPTLSVTKKVTGAFANLLQSFKITINVKDAQNKPLNGSYSAIV
NNQKTTLQFTNGKATVDLKKDKTIKILDLPLNARYSIEEEASSSRGYQVS
YDKKEGTLDANKSATVTNNKNSVPETGIDFLSSTLVLGVVLPLGGIFFII
LLGHLVVNRRK

[0046] LPXTG-1 contains a sortase substrate motif, VPXTG (SEQ ID NO:16), shown in underscore in SEQ ID NO:2, above.

[0047] The orf01290-long sequence (SEQ ID NO:1) has an intermediary stop codon that is bolded and underscored in SEQ ID NO:1. An exemplary nucleic acid sequence halted at this stop codon (orf01290-short) would have the following transcribed gene sequence (LPXTG-1A):

(SEQ ID NO: 3)
ATGGACGCGGGCATTGGCACTGGGACAAATATAAATGCTGGGTTAACTGA
AGCTCAAAGATTGTTGCAAAGTGCAAGGGCTGGGGCAAAAAAAGTAGTTA
TTCTGCTGTCAGATGGCGAAGCTAATATGTATTACGAGTCTAATAGTGGG
AGAACAATATATAACTATTATTCTAATCCAAATGTGGGACGTATGATTGA
TACTCCATATTGGTTTACCTCTGGTTTAGAGAGAGGAATGCTGAATATAT
CTAGTTTAATAGCTCCAAAAATAGATGGCTTTTATTCAATCAAATTCAGA
TATATAGGTTCAAACGATAGTATCACATCTCTTAAAGGATATATCAGTGG
TTATAATTCTGGAATCCCCAACGAAATATTTTCTGCCAATAATGAAAATG
ACTTGCAACAAAAATTCAAAGAAATCACAGATAAAATTCTACCTCTAGGC
GTACACCATGTAACTATATCAGATGTCTTGTCCAAGTACGTGCAGCTGTT
ACCTGGTGATGCTTCACACCTTCGTGTCGTCAAAATCAAGGATGGTAACG
AGCAAGAACTGAATGACAATCAAGTTACGATTGAAACTAAGAAGAACGAA
CAGGGATTAGTGGAAGTAACAGCCAAGTTTAATCCGAGTTACACTTTGGA
GGATGACGCCAAGTACGTTCTCAAGTTTACTGTCACCTCTAGCCAAGAGG
CATTTGATGCGATTGCGGGTGATAAGACACTTACTAGTGATGATGCCGAA
GAAGCCGATGCTACTAAACTCTACTCCAACAAGGGGGCAAAAGTTGCCTA
TTCCTATGGTATTGGGACCTCACGTACCAAAATAAAAGACTATTCTGAGA
AGCCCACTTTCAAGCCGTCAGATCCATTGACGGTTCCTGTAGAGATTGAG
TGGAAAGGTGTGGATGGAAAATCAAATCCATCAGCAAATCGTCCACCTAG
TGTCGAATTAAACTTAAACCAAAAGAAAGATGGAAGTATAAAGGATTCCT
ATCGAAAGGTCACTAGTCCAGTTCAAACGAATAGTTTTACTGAAAATACT
AGTTTTGCAAAGGTAGCTAAGGGATATGACTACGAACTGAAAGCACCAGA
CGCTCCGGGATACACAGTCGAAGTTCAAAAGACAGGTACGAAAGAGAAAC
CATCCTTCAAAGTTATTTACCGACAGCTTCCAAGTCTCACCGTAAAGAAA
ATCCTAGAAGGTGAACAATCACCTAATAAATCTTTCACAATTAATGTTAC
CTTTTCAGATAAGGATGGCAAGCCGATTAACGGCAAGTTTGGGAATACAA
CAGTGACTAACGGGAAAGCACAGATTTCTCTCAAAAATAGTCAGGAAACT
GCCCTCAGTTATCTGCCTCGTGATACCCACTATAAGGTGGAAGAAGTAGA
GAACTCTAGAACGGGATATCATGTCACCTATGAAAAACAAGAGGGGACTT
TGTCAGAGGATGTTCAAACAATCGTCACCAACCACAGACTTCCGACACTT
TCAGTCACAAAAAAAGTTACAGGTGCTTTTGCTAATCTTCTGCAATCCTT
TAAGATTACCATTAACGTAAAGGATGCGCAAAATAAACCATTGAATGGAT
CGTATAGTGCAATAGTAAATAATCAAAAAACAACGCTACAATTCACCAAT
GGTAAGGCGACAGTTGATCTAAAGAAAGATAAAACCATCAAGATTCTCGA
CCTTCCTCTAAATGCTCGTTATAGTATCGAAGAAGAAGCAAGTTCGTCTC
GTGGGTATCAGGTGTCCTATGATAAAAAAGAAGGAACTCTTGATGCAAAT
AAGTCTGCGACAGTCACGAATAATAAAAACAGCGTACCTGAAACGGGAAT
TGACTTCTTGAGTAGCACTCTCGTGCTTGGAGTCGTTCTTCCTCTAGGAG
GGATCTTCTTTATCATCTTACTTGGTCACCTTGTGGTGAATAGGAGGAA

[0048] An exemplary amino acid sequence for LPXTG-1A (from orf01290-short) is hereby provided:

(SEQ ID NO: 4)
MDAGIGTGTNINAGLTEAQRLLQSARAGAKKVVILLSDGEANMYYESNSG
RTIYNYYSNPNVGRMIDTPYWFTSGLERGMLNISSLIAPKIDGFYSIKFR
YIGSNDSITSLKGYISGYNSGIPNEIFSANNENDLQQKFKEITDKILPLG
VHHVTISDVLSKYVQLLPGDASHLRVVKIKDGNEQELNDNQVTIETKKNE
QGLVEVTAKFNPSYTLEDDAKYVLKFTVTSSQEAFDAIAGDKTLTSDDAE
EADATKLYSNKGAKVAYSYGIGTSRTKIKDYSEKPTFKPSDPLTVPVEIE
WKGVDGKSNPSANRPPSVELNLNQKKDGSIKDSYRKVTSPVQTNSFTENT
SFAKVAKGYDYELKAPDAPGYTVEVQKTGTKEKPSFKVIYRQLPSLTVKK
ILEGEQSPNKSFTINVTFSDKDGKPINGKFGNTTVTNGKAQISLKNSQET
ALSYLPRDTHYKVEEVENSRTGYHVTYEKQEGTLSEDVQTIVTNHRLPTL
SVTKKVTGAFANLLQSFKITINVKDAQNKPLNGSYSAIVNNQKTTLQFTN
GKATVDLKKDKTIKILDLPLNARYSIEEEASSSRGYQVSYDKKEGTLDAN
KSATVTNNKNSVPETGIDFLSSTLVLGVVLPLGGIFFIILLGHLVVNRRK

[0049] LPXTG-1A contains a sortase substrate motif, VPXTG (SEQ ID NO:16), shown in underscore in SEQ ID NO:4, above.

[0050] An exemplary nucleic acid sequence for LPXTG-2 (orf01287) is hereby provided:

(SEQ ID NO: 5)
TTGATGATCATAATGAAAAAAGAAAATAAAAAAACAAAAGAAATAATCAT
GAAAAAAACATTCTTTAAAAAGCTATTCACTGCAAGCATTGCAGCTATAA
CCGCTTTGTCCGTATTCAGAGGTGTCCCGACTTTTGCGGATGATAATTCA
GCAATAACCAAAGCAAATGGTGAAAATAATGCTGTTGTGAAGATTAATAA
AACGTTGAATATTGCAGAGGGAATAACAACACCAACAGCGACATTTACAT
TTAAGTTTACAGAAAAAACAGGACAATCTTCTAACGGTGCGCCATATCAA
ACCGGAGTTGCAATTCCAGATAGAAATGTAGAATACAATAAAAATGATCA
CCCAACTGCTGATAAGATTCAAAAAGCAACAGAAGACATTTTTTCGGGAG
TTGCTTATGGCCATGCTGGTGAATACGTTTATGATGTAGCGGAAGCAAAA
ACTGGATGGCAGGCGATTACCAAAAATGGTAAAACAATTGATGCCATGAG
ATACGACAAACGTACATATGAAATGCACGTTATTGTTAAGAATAAAGTAA
ATGGTGGTGTCTATATTTCATCAGTATACTTTAAGGAAAATAATAAATCT
AACGCCCCTAAAGTAGAACCAAGTGAACAAGGCGTTTATAATTTATTTGA
TAACACATATACCAAAGACGCAAGTAAGGAGCCTAATCCTGATGATCCGA
GTCAAGTAGACCCCAATGCGAAAGCATTAACAATTACTAAAAAAGTTGAT
GGAGCTTCAGGGGATAAAACAAGAGATTTCCAATTCCATATCAAGATTCA
ACTTCCAAGTACAAATAAAACAGCAGAAACCCCTGTTACGAATATTATAG
TAAAACATGGATCTAAGTCAGAGGTGTTGGCAGTAGTGACCCCAGCAGAT
ACAGTTGAGTACAATTTTACTCTTAAAGATGGTGAAACATTTACAGTTGA
ACAACTACCAGCAGGTTCTAAATATACAGTAACTGAAACTGGAGTAGCAG
GTTATACAGATTCATCAATTTATACTACAAATGGTGCAGAACAAACATCT
CAAGGACAAAAAAATGTAGATTTTACATTAACAGATATCCTCATAGGTGA
AAAGAAAAACGACAACAAAGTTACTAACAAAATCGACGACGTTACTCCTA
CTGGTCTCTTGATTGATAACCTTCCATTCATTTTGATGATTGGTCTTGGT
TTGGCTGGATTTGTTGTCTTGTCTAAAAAACGTAGAGAAGCCTA

[0051] An exemplary amino acid sequence for LPXTG-2 is hereby provided:

(SEQ ID NO: 6)
MIIMKKENKKTKEIIMKKTFFKKLFTASIAAITALSVFRGVPTFADDNSA
ITKANGENNAVVKINKTLNIAEGITTPTATFTFKFTEKTGQSSNGAPYQT
GVAIPDRNVEYNKNDHPTADKIQKATEDIFSGVAYGHAGEYVYDVAEAKT
GWQAITKNGKTIDAMRYDKRTYEMHVIVKNKVNGGVYISSVYFKENNKSN
APKVEPSEQGVYNLFDNTYTKDASKEPNPDDPSQVDPNAKALTITKKVDG
ASGDKTRDFQFHIKIQLPSTNKTAETPVTNIIVKHGSKSEVLAVVTPADT
VEYNFTLKDGETFTVEQLPAGSKYTVTETGVAGYTDSSIYTTNGAEQTSQ
GQKNVDFTLTDILIGEKKNDNKVTNKIDDVTPTGLLIDNLPFILMIGLGL
AGFVVLSKKRREA

[0052] LPXTG-2 contains a sortase substrate motif, VTXTG (SEQ ID NO:21), shown in underscore in SEQ ID NO:6, above.

Polypeptide Sequences Identified in 23F, INV200, and OXC141 S. pneumoniae Strains

[0053] The Sanger partial genomes for S. pneumoniae strains 23F, INV200, and OXC141 do not contain the S. pneumoniae pilus II island (INV104B) region. However, 23F, INV200, and OXC141 encode sortases and LPXTG cell wall anchored proteins, which are disclosed herein. For example, 23F and OXC141 each encode at least one sortase (sort-23F (orf01917; SEQ ID NO:1386) and sort-OXC141 (orf01672; SEQ ID NO:282)) and INV200 encodes at least three cell wall anchored proteins (Anchor-1, Anchor-2, and Anchor-3) that are not encoded by S. pneumoniae strain INV104B.

[0054] An exemplary amino acid sequence for Anchor-1 (INV200-orf00426) is hereby provided:

(SEQ ID NO: 7)
MRVSSDTNIYEYRALSPQQKAALEMIRADLYKFTVPYENLEYRFYKPDWV
FGLGYQALATVRWKIEPATITVTKKWENVKEGAKKPDVWIQLLKDGKPEG
ERKRIESDKGQTTFEIPNKDEINKYSVKEVDKEGRDWKHKDFTAGQPVNK
GNGHFEITNTKKEKPKIKVTFKKIAGDTNKDLAGAHLVLKKIFDDGNGLL
IKQWDTIGQPVDIDLDAGSYTLTEEKAPDGYMLAAPVSFYVEEDGQIILP
KGEDLEAQNDKTITMVDEKIKEKPTKPSGKLATTVEVDGTKADAQKELEL
SVATDKVTKTVKDTVVYENLLAGETYKLTGQLMKITADKEEEVATKETTF
VADASGNGTTSLEFEDVSLEAGVKYVVYETAESEKEIDFKEGKEKHKVEH
KDKDDKAQTVVVTKEKPTKPSGKLATTVEVDGTKADAQKELELSVATDKV
TKTVKDTVVYENLLAGETYKLTGQLMKITADKEEEVATKETTFVADASGN
GTTSLEFEDVSLEAGVKYVVYETAESEKEIDFKEGKEKHKVEHKDKDDKA
QTVVVSKIKPEPGAQEVHFSKVNVGGEEIAGAEIHIKQGDTVVASWVSEA
GKTHTLKLKPGHYIFHEAVAPGGYLAVTDIHFSVDETGQVTVTDVNGNTA
VAEGNKLTVTDQTKPVTPPSPEEPGAQEVHFSKVNVGGEEIAGAEIHIKQ
GDTVVASWVSEAGKTHTLKLKPGHYIFHEAVAPGGYLAVTDIHFSVDETG
QVTVTDVNGNTAVAEGNKLTVTDQTKPVTPPSPEEPGAQEVHFSKVNVGG
EEIAGAEIHIKQGDTVVASWVSEAGKTHTLKLKPGHYIFHEAVAPGGYLA
VTDIHFSVDETGQVTVTDVNGNTAVAEGNKLTVTDQSADKDKQDKLPNTG
ETTGTYLSILGMITAVFASLLYRSKKK

[0055] Anchor-1 contains a sortase substrate motif, LPNTG (SEQ ID NO:10), shown in underscore in SEQ ID NO:7, above.

[0056] An exemplary amino acid sequence for Anchor-2 (INV200-orf00441) is hereby provided:

(SEQ ID NO: 8)
MNKGLFEKRCKYSIRKFSLGVASVMIGAAFFGTSPVLADSVQSGSTANLP
ADLATALATAKENDGRDFEAPKVGEDQGSPEVTDGPKTEEELLALEKEKP
AEEKPKEDKPAAAKPETPKTVTPEWQTVEKKEQKGTVTIREEKGVRYNQL
SSTAQNDNAGKPALFEKKGLTVVANGNATVDLTFKDDSEKGKSRFGVFLK
FKDTNNNVFVGYDKDGWFWEYKSPTTSTWYRGSRVAAPETGSTNRLSITL
KSDGQLNASNNDVNLFDTVTLPAAVNDHLKNEKKILLKAGSYGNDRTVVS
VKTDNQEGVKADDTPAQKETGPVVDDSEVTYDTIQSKVLKAVIDQAFPRV
KEYSLNGHTLPGQVQQFNQVFINNHRITPEVTYKKINETTAEYLMKIRDD
AHLINAEMTVRLQVVDNQLHFDVTKIVNHNQVTPGQKIDDERKLLSSISF
LGNALVSVSSDQTGAKFDGATMSNNTHVSGDDHIDVTNPMKDLAKGYMYG
FVSTDKLAAGVWSNSQNSYGGGSNDWTRLTAYKETVGNANYVGIHSSEWQ
WEKAYKGIVFPEYTKELPSAKVVITEDANADKKVDWQDGAIAYRSIMNNP
QGWEKVKDITAYRIAMNFGSQAQNPFLMTLDGIKKINLHTDGLGQGVLLK
GYGSEGHDSGHLNYADIGKRIGGVEDFKTLIEKAKKYGAHLGIHVNASET
YPESKYFNEKILRKNPDGSYSYGWNWLDQGINIDAAYDLAHGRLARWEDL
KKKLGDGLDFIYVDVWGNGQSGDNGAWATHVLAKEINKQGWRFAIEWGHG
GEYDSTFHHWAADLTYGGYTNKGINSAITRFIRNHQKDAWVGDYRSYGGA
ANYPLLGGYSMKDFEGWQGRSDYNGYVTNLFAHDVMTKYFQHFTVSKWEN
GTPVTMTDNGSTYKWTPEMRVELVDADNNKVVVTRKSNDVNSPQYRERTV
TLNGRVIQDGSAYLTPWNWDANGKKLSTDKEKMYYFNTQAGATTWTLPSD
WAKSKVYLYKLTDQGKTEEQELTVKDGKITLDLLANQPYVLYRSKQTNPE
MSWSEGMHIYDQGFNSGTLKHWTISGDASKAEIVKSQGANDMLRIQGNKE
KVSLTQKLTGLKPNTKYAVYVGVDNRSNAKASITVNTGEKEVTTYTNKSL
ALNYVKAYAHNTRRDNATVDDTSYFQNMYAFFTTGADVSNVTLTLSREAG
DQATYFDEIRTFENNSSMYGDKHDTGKGTFKQDFENVAQGIFPFVVGGVE
GVEDNRTHLSEKHNPYTQRGWNGKKVDDVIEGNWSLKTNGLVSRRNLVYQ
TIPQNFRFEAGKTYRVTFEYEAGSDNTYAFVVGKGEFQSGRRGTQASNLE
MHELPNTWTDSKKAKKATFLVTGAETGDTWVGIYSTGNASNTRGDSGGNA
NFRGYNDFMMDNLQIEEITLTGKMLTENALKNYLPTVAMTNYTKESMDAL
KEAVFNLSQADDDISVEEARAEIAKIEALKNALVQKKTALVADDFASLTA
PAQAQEGLANAFDGNVSSLWHTSWNGGDVGKPATMVLKEPTEITGLRYVP
RGSGSNGNLRDVKLVVTDESGKEHTFTATDWPDNNKPKDIDFGKTIKAKK
IVLTGTKTYGDGGDKYQSAAELIFTRPQVAETPLDLSGYEAALAKAQKLT
DKDNQEEVASVQASMKYATDNHLLTERMVEYFADYLNQLKDSATKPDAPT
VEKPEFKLSSLVSEQGKTPDYKQEIARPETPEQILPATGESQSDTSLFLA
SVSLALSALFVVKTKKD

[0057] Anchor-2 contains a sortase substrate motif, LPATG (SEQ ID NO:10), shown in underscore in SEQ ID NO:8, above.

[0058] An exemplary amino acid sequence for Anchor-3 (INV200-orf03448) is hereby provided:

(SEQ ID NO: 9)
MRVSSDTNIYEYRALSPQQKAALEMIRADLYKFTVPYENLEYRFYKPDWV
FGLGYQALATVRWKIEPATITVTKKWENVKEGAKKPDVWIQLLKDGKPEG
ERKRIESDKGQTTFEIPNKDEINKYSVKEVDKEGRDWKHKDFTAGQPVNK
GNGHFEITNTKKEKPKIKVTFKKIAGDTNKDLAGAHLVLKKIFDDGNGLL
IKQWDTIGQPVDIDLDAGSYTLTEEKAPDGYMLAAPVSFYVEEDGQIILP
KGEDLEAQNDKTITMVDEKIKEKPTKPSGKLATTVEVDGTKADAQKELEL
SVATDKVTKTVKDTVVYENLLAGETYKLTGQLMKITADKEEEVATKETTF
VADASGNGTTSLEFEDVSLEAGVKYVVYETAESEKEIDEKEGKEKHKVEH
KDKDDKAQTVVVTKEKPTKPSGKLATTVEVDGTKADAQKELELSVATDKV
TKTVKDTVVYENLLAGETYKLTGQLMKITADKEEEVATKETTFVADASGN
GTTSLEFEDVSLEAGVKYVVYETAESEKEIDFKEGKEKHKVEHKDKDDKA
QTVVVTKEKPTKPSGKLATTVEVDGTKADAQKELELSVATDKVTKTVKDT
VVYENLLAGETYKLTGQLMKITADKEEEVATKETTFVADASGNGTTSLEF
EDVSLEAGVKYVVYETAESEKEIDFKEGKEKHKVEHKDKDDKAQTVVVTK
EKPTKPSGKLATTVEVDGTKADAQKELELSVATDKVTKTVKDTVVYENLL
AGETYKLTGQLMKITADKEEEVATKETTFVADASGNGTTSLEFEDVSLEA
GVKYVVYETAESEKEIDFKEGKEKHKVEHKDKDDKAQTVVVSKIKPEPGA
IQEVHFSKVNVGGEEAGAEIHIKQGDTVVASWVSEAGKTHTLKLKPGHYI
FHEAVAPGGYLAVTDIHFSVDETGQVTVTDVNGNTAVAEGNKLTVTDQTK
PVTPPSPEEPGAQEVHFSKVNVGGEEIAGAEIHIKQGDTVVASWVSEAGK
THTLKLKPGHYIFHEAVAPGGYLAVTDIHFSVDETGQVTVTDVNGNTAVA
EGNKLTVTDQTKPVTPPSPEEPGAQEVHFSKVNVGGEEIAGAEIHIKQGD
TVVASWVSEAGKTHTLKLKPGHYIFHEAVAPGGYLAVTDIHFSVDETGQV
TVTDVNGNTAVAEGNKLTVTDQTKPVTPPSPEEPGAQEVHFSKVNVGGEE
IAGAEIHIKQGDTVVASWVSEAGKTHTLKLKPGHYIFHEAVAPGGYLAVT
DIHFSVDETGQVTVTDVNGNTAVAEGNKLTVTDQSADKDKQDKLPNTGET
TGTYLSILGMITAVFASLLYRSKKK

[0059] Anchor-3 contains a sortase substrate motif, LPNTG (SEQ ID NO:10), shown in underscore in SEQ ID NO:9, abOve.

[0060] 23F, INV200, and OXC141 also encode additional polypeptide sequences that are not encoded by S. pneumoniae strain INV104B. These additional polypeptide sequences are disclosed herein in Example 2 as specific examples of sequences that can be used in the methods described herein and as antigens in immunogenic compositions for the production of antibodies and/or the stimulation of an immune response in a subject.

Other Bacterial Pili Polypeptides and Polypeptides from S. pneumoniae

[0061] The methods and compositions described herein can be used with pili polypeptides or other polypeptides from any Gram-positive bacterium including, for example, S. pneumoniae. Known and putative pili proteins have been identified in GAS (e.g., Streptococcus pyogenes) (Mora et al., 2005, Proc. Natl. Acad. Sci. USA, 102:15641-6), GBS (e.g., Streptococcus agalactiae) (Lauer et al., 2005, Science, 309:105; WO 2006/078318), Actinomycetes naeslundii (Yeung et al., 1998, Infect. Immun., 66:1482-91), Corynebacterium diphtheriae (Ton-That et al., 2003, Mol. Microbiol., 50:1429-38; Ton-That and Schneewind, 2004, Trends. Microbiol., 12:228-34), Clostridium perfringens, and Enterococcus faecalis. Examples of Gram-positive bacteria include, without limitation, firmicutes such as those of genera Streptococcus (e.g., S. pneumoniae, S. agalactiae, S. pyogenes, S. suis, S. zooepidemicus, S. viridans, S. mutans, S. gordonii, S. equi), Bacillus (e.g., B. anthracis, B. cereus, B. subtilis), Listeria (e.g., L. innocua, L. monocytogenes), Staphylococcus (e.g., S. aureus, S. epidermidis, S. caprae, S. saprophyticus, S. lugdunensis, S. schleiferi), Enterococcus (e.g., E. faecalis, E. faecium), Lactobacillus, Lactococcus (e.g., L. lactis), Leuconostoc (e.g., L. mesenteroi des), Pectinatus, Pediococcus, Acetobacterium, Clostridium (e.g., C. botulinum, C. difficile, C. perfringens, C. tetani), Ruminococcus (e.g., R. albus), Heliobacterium, Heliospirillum, and Sporomusa; and actinobacteria such as those of genera Actinomycetes (e.g., A. naeslundii), Corynebacterium (e.g., C. diphtheriae, C. efficiens), Arthrobacter, Bifidobacterium (e.g., B. longum), Frankia, Micrococcus, Micromonospora, Mycobacterium (e.g., M. tuberculosis, M. leprae, M. Bovis, M. africanum, M. microti), Nocardia (e.g., N. asteroides), Propionibacteriun, and Streptomyces (e.g., S. somaliensis, S. avermitilis, S. coelicolor).

Isolated Pili Polypeptides and Other Polypeptides from S. pneumoniae

[0062] Isolated S. pneumoniae Polypeptides, can be used in the methods described herein and as antigens in immunogenic compositions for the production of antibodies and/or the stimulation of an immune response in a subject. Examples of useful S. pneumoniae LPXTG cell wall anchor pili polypeptides include LPXTG-1, LPXTG-1A, LPXTG-2, Anchor-1, Anchor-2, and Anchor-3 (i.e., SEQ ID NOs:2, 4, 6, 7, 8, and 9). Examples of useful S. pneumoniae sortase polypeptides include sort-1, sort-2, sort-23F, and sort-OXC141 (i.e., SEQ ID NOs:676, 1123, 1386, and 282). Variants of S. pneumoniae Polypeptides can also be used in the methods described herein and as antigens in immunogenic compositions for the production of antibodies and/or the stimulation of an immune response in a subject. For example, S. pneumoniae Polypeptides containing at least 80% sequence identity, e.g., at least 85%, at least 90%, at least 95%, at least 98%, or at least 99%, with a S. pneumoniae Polypeptide sequence are also useful in the new methods. Furthermore, a S. pneumoniae Polypeptide sequence with up to 50, e.g., 1, 3, 5, 10, 15, 20, 25, 30, or 40 amino acid insertions, deletions, or substitutions, e.g., conservative amino acid substitutions will be useful in the compositions and methods described herein.

[0063] The determination of percent identity between two amino acid sequences can be accomplished using the BLAST 2.0 program, which is available to the public at ncbi.nlm.nih.gov/BLAST. Sequence comparison is performed using an ungapped alignment and using the default parameters (BLOSUM 62 matrix, gap existence cost of 11, per residue gap cost of 1, and a lambda ratio of 0.85). The mathematical algorithm used in BLAST programs is described in Altschul et al., 1997, Nucleic Acids Research, 25:3389-3402.

[0064] As used herein, “conservative amino acid substitution” means a substitution of an amino acid in a polypeptide within an amino acid family. Families of amino acids are recognized in the art and are based on physical and chemical properties of the amino acid side chains. Families include the following: amino acids with basic side chains (e.g. lysine, arginine, and histidine); amino acids with acidic side chains (e.g., aspartic acid and glutamic acid); amino acids with uncharged polar side chains (e.g. glycine, asparagine, glutamine, serine, threonine, tyrosine, and cysteine); amino acids with nonpolar side chains (e.g. alanine, valine, leucine, isoleucine, proline, phenylalanine, methionine, and tryptophan); amino acids with branched side chains (e.g., threonine, valine, and isoleucine); and amino acids with aromatic side chains (e.g., tyrosine, phenylalanine, tryptophan, and histidine). An amino acid can belong to more than one family.

[0065] Fragments of S. pneumoniae Polypeptides, e.g., immunogenic fragments, are also useful in the methods and compositions described herein. Typically, the fragments are at least 8, 10, 15, 20, 50, 100, 200, or 500 contiguous amino acid residues of a S. pneumoniae Polypeptide. Examples of S. pneumoniae LPXTG polypeptides with useful fragments include LPXTG-1, LPXTG-1A, LPXTG-2, Anchor-1, Anchor-2, or Anchor-3 (e.g., SEQ ID NO:2, 4, 6, 7, 8, or 9). Non-limiting examples of S. pneumoniae sortase polypeptides with useful fragments include sort-1, sort-2, sort-23F, and sort-OXC141 (i.e., SEQ ID NOs:676, 1123, 1386, and 282). In some embodiments the fragments retain at least one biological activity of the full-length protein, such as covalent attachment to a peptidoglycan cell wall or the ability to cross-link to another fragment or protein through an LPXTG motif.

[0066] In some embodiments the immunogenic compositions described herein comprise one or more S. pneumoniae Pilus Polypeptides that may be formulated or purified in an oligomeric (pilus) form. In some embodiments, the oligomeric form is a hyperoligomer. In some embodiments the immunogenic compositions described herein comprise one or more S. pneumoniae Pilus Polypeptides that have been isolated in an oligomeric (pilus) form. The oligomer or hyperoligomer pilus structures comprising S. pneumoniae Pilus Polypeptides may be purified or otherwise formulated for use in immunogenic compositions.

[0067] One or more of the S. pneumoniae Polypeptides from S. pneumoniae open reading frame polynucleotide sequences may be replaced by a polynucleotide sequence coding for a fragment of the replaced ORF. In some embodiments, one or more of the S. pneumoniae Polypeptides from S. pneumoniae open reading frames may be replaced by a sequence having sequence homology to the replaced ORF.

[0068] One or more of the S. pneumoniae Pilus Polypeptide sequences typically include an LPXTG motif (such as LPXTG (SEQ ID NO:10)) or other sortase substrate motif. The LPXTG sortase substrate motif of a S. pneumoniae pilus protein may be generally represented by the formula X₁X₂X₃X₄G (SEQ ID NO:1746), wherein X₁ is an L, a V, an E, a Y, an I, or a Q; wherein X₂ is a P if Xᵢ is an L; wherein X₂ is a V if X₁ is a E or a Q; wherein X₂ is a V or a P if X₁ is a V; wherein X₃ is any amino acid residue; wherein X₄ is a T if X₁ is a V, E, or Q; and wherein X₄ is a T, S, or A if X₁ is an L. Non-limiting examples of LPXTG motifs include YPXTG (SEQ ID NO:11), IPXTG (SEQ ID NO:12), LPXSG (SEQ ID NO:13), VVXTG (SEQ ID NO:14), EVXTG (SEQ ID NO:15), VPXTG (SEQ ID NO:16), QVXTG (SEQ ID NO:17), LPXAG (SEQ ID NO:18), QVPTG (SEQ ID NO:19), FPXTG (SEQ ID NO:20) and VTXTG (SEQ ID NO:21).

[0069] The S. pneumoniae Pilus Polypeptides described herein can effect the ability of the S. pneumoniae bacteria to adhere to and invade epithelial cells. These pilus polypeptides may also affect the ability of S. pneumoniae to translocate through an epithelial cell layer. In some embodiments, one or more S. pneumoniae Pilus Polypeptides from S. pneumoniae are capable of binding to or otherwise associating with an epithelial cell surface or synthetic model thereof. In some embodiments one or more S. pneumoniae Pilus Polypeptides bind to or associate with one or more of fibrinogen, fibronectin, or collagen.

[0070] The S. pneumoniae sortase proteins are predicted to be involved in the secretion and anchoring of the LPXTG containing surface proteins. The S. pneumoniae pilus II island (INV104B) sortase proteins disclosed herein are encoded by genes (sort-1 and sort-2) found in the same 6.5 kb insert between genes corresponding to sp1008 and sp1009 of TIGR4 as the LPXTG-1 and LPXTG-2 genes discussed above. 23F and OXC141 also encode sortases: sort-23F (SEQ ID NO:1386) and sort-OXC141 (SEQ ID NO:282). Sortase proteins and variants of sortase proteins useful in the methods described herein can be obtained from Gram-positive bacteria.

[0071] The S. pneumoniae Pilus Polypeptides can be covalently attached to the bacterial cell wall by membrane-associated transpeptidases, such as a sortase. The sortase may function to cleave the surface protein, preferably between the threonine and glycine residues of an LPXTG motif. The sortase may then assist in the formation of an amide link between the threonine carboxyl group and a cell wall precursor such as lipid II. The precursor can then be incorporated into the peptidoglycan via the transglycoslylation and transpeptidation reactions of bacterial wall synthesis. See Comfort et al., Infection & Immunity (2004) 72(5): 2710-2722.

[0072] In some embodiments, the compositions described herein comprise oligomeric, pilus-like structures comprising S. pneumoniae Pilus Polypeptides such as LPXTG-1, LPXTG-1A, LPXTG-2, Anchor-1, Anchor-2, or Anchor-3 (e.g., SEQ ID NO:2, 4, 6, 7, 8, or 9). The oligomeric, pilus-like structure may comprise numerous units of pilus poplypeptides. In some embodiments, the oligomeric, pilus-like structures comprise two or more pilus proteins. In some embodiments, the oligomeric, pilus-like structure comprises a hyper-oligomeric pilus-like structure comprising at least two (e.g., 2, 3, 4, 5, 6, 7, 8, 9, 10, 11, 12, 13, 14, 15, 20, 25, 30, 35, 40, 45, 50, 60, 70, 80, 90, 100, 120, 140, 150, 200 or more) oligomeric subunits, wherein each subunit comprises a pilus protein or a fragment thereof. The oligomeric subunits may be covalently associated via a conserved lysine within a pilin motif. The oligomeric subunits may be covalently associated via an LPXTG motif, in some embodiments, via a threonine or serine amino acid residue.

[0073] S. pneumoniae Pilus Polypeptides or fragments thereof can be incorporated into the oligomeric, pilus-like structures described herein and will, in some embodiments, include a pilin motif. Oligomeric, pilus-like structures may be used alone or in combination. In some embodiments, the compositions described herein comprise a S. pneumoniae pilus II island (INV104B) pilus in oligomeric form. Further, in some embodiments the S. pneumoniae pilus II island (INV104B) pilus can be organized in a hyperoligomeric form.

### Methods of Purification of Pili

[0074] Pili encoded by Streptococcus pneumoniae can be purified from cells, such as bacterial cells, that express Streptococcus pneumoniae pili or pili-like structures by separating the pili from the cells, e.g., by mechanical shearing or enzymatic digestion, and isolating the separated pili.

[0075] Suitable bacterial cells for purification of pili include piliated Gram-positive bacterial strains that express Streptococcus pneumoniae Pili Polypeptides, non-piliated Gram-positive bacteria that have been transformed with one or more Gram-positive pilus proteins, such as S. pneumoniae LPXTG-1, LPXTG-1A, LPXTG-2, Anchor-1, Anchor-2, and Anchor-3 (e.g., SEQ ID NOs:2, 4, 6, 7, 8, and 9), and Gram-negative or other cells transformed with one or more Gram-positive pilus proteins, such as S. pneumoniae LPXTG-1, LPXTG-1A, LPXTG-2, Anchor-1, Anchor-2, and Anchor-3 (e.g., SEQ ID NOs:2, 4, 6, 7, S, and 9). Typically, a cell used for purification of pili will produce only the type or types of pili desired, e.g., endogenous or heterologous pili. For the production of heterologous pili, the cell can be altered, e.g., by mutation or recombinant DNA methods, to not produce endogenous pili. Typically, a pili-producing Gram-positive bacterial cell useful for purification will express one or more compatible sortases such that the pili are expressed on the cell surface. Examples of S. pneumoniae pilus II island (INV104B), 23F, INV200, and OXC141 LPXTG cell wall anchor polypeptides that could be purified include LPXTG-1, LPXTG-1A, LPXTG-2, Anchor-1, Anchor-2, and Anchor-3 (e.g., SEQ ID NOs:2, 4, 6, 7, 8, and 9). Examples of S. pneumoniae pilus II island (INV104B), 23F, INV200, and OXC141 sortases that could be purified include sort-1, sort-2, sort-23F, and sort-OXC141 (e.g., SEQ ID NOs:676, 1123, 1386, and 282).

[0076] Separation of pili from Gram-positive bacterial cells is typically accomplished by mechanical shearing, enzymatic digestion, decreasing or inhibiting sortase activity, or treatment with a compound that interferes with cell wall integrity. Mechanical shearing can physically remove the pili from the cells, whereas other methods can eliminate the point of attachment of the pili (e.g., by degradation of cell wall or pilus components). Following separation of the pili from the cells, the pili and cells can be separated, e.g., by centrifugation.

[0077] Non-limiting examples of mechanical shearing methods include ultrasonication, glass bead shearing, and mixing. Methods of sonication are discussed, for example, in Yamaguchi et al., 2004, Current Microbiol., 49:59-65. Methods of glass bead shearing are discussed, for example, in Levesque et al., 2001, J. Bacteriol., 183:2724-32. General methods of mechanical shearing are discussed, for example, in Wolfgang et al., 1998, Mol. Microbiol., 29:321-30; Trachtenberg et al., 2005, J. Mol. Biol., 346:665-676; Parge et al., 1990, J. Biol. Chem., 265:2278-85; Isaacson et al., 1981, J. Bacteriol., 146:784-9; Korhonen et al., 1980, Infect. Immun., 27:569-75; Hahn et al., 2002, J. Mol. Biol., 323:845-57; St. Geme et al., 1996, Proc. Natl. Acad. Sci. USA, 93:11913-18; Weber et al., 2005, J. Bacteriol., 187:2458-68; and Mu et al., 2002, J. Bacteriol., 184:4868-74.

[0078] Non-limiting examples of enzymes suitable for enzymatic digestion include cell-wall degrading enzymes such as mutanolysin, lysostaphin, and lysozymes. Methods of enzymatic digestion are discussed, for example, in Bender et al., 2003, J. Bacteriol., 185:6057-66; Ton-That et al., 2004, Mol. Microbiol., 53:251-61; and Ton-That et al., 2003, Mol. Microbiol., 50:1429-38. For downstream administration to subjects, one can use multiple enzymes to remove cell-wall components that may cause an undesired host reaction.

[0079] Non-limiting examples of methods of inhibiting or decreasing sortase activity include decreasing, for example, SrtA activity by introduction of a loss-of-function allele of SrtA, deleting the endogenous SrtA gene, expression of a nucleic acid that decreases SrtA expression (e.g., an antisense or miRNA), and treating the cells with a compound that inhibits SrtA activity (see, e.g., Marrafini et al., Microbiol. Mol. Biol. Rev., 70:192-221, 2006).

[0080] Exemplary sortase A inhibitors include methane-thiosulfonates (e.g., MTSET and (2-sulfonatoethyl) methane-thiosulfonate) (Ton-That and Schneewind, J. Biol. Chem., 274:24316-24320, 1999), p-hydroxymercuribenzoic acid, glucosylstero β-sitosterol-3-O-glucopyranol (Kim et al., Biosci. Biotechnol. Biochem., 67:2477-79, 2003), berberine chloride (Kim et al., Biosci. Biotechnol. Biochem., 68:421-24, 2004), peptidyl-diazomethane (LPAT-CHN2) (Scott et al., Biochem. J., 366:953-58, 2002), peptidyl-chloromethane (LPAT-CH2Cl), peptidyl-vinyl sulfone [LPAT-SO₂(Ph)] (Conolly et al., J. Biol. Chem., 278:34061-65, 2003), vinyl sulfones (e.g., di-, ethyl-, methyl-, and phenyl vinyl sulfones) (Frankel et al., J. Am. Chem. Soc., 126:3404-3405, 2004), LPXTG motif peptides with the threonine residue replaced by a phosphinate group (e.g., LPEΨ{PO₂H—CH₂}G) (Kruger et al., Bioorg. Med. Chem., 12:3723-29, 2004), substituted (Z)-diaryl-acrylonitriles (Oh et al., J. Med. Chem., 47:2418-21, 2004), and extracts of various medicinal plants (Kim et al., Biosci. Biotechnol. Biochem., 66:2751-54, 2002).

[0081] Non-limiting examples of compounds that interfere with cell wall integrity include glycine and antibiotics such as penicillins (e.g., methicillin, amoxicillin, ampicillin), cephalosporins (e.g., cefalexin, cefproxil, cefepime), glycopeptides (e.g., vancomycin, teicoplanin, ramoplanin), and cycloserine.

[0082] Separated pili can be separated from other components by density, for example by using density gradient centrifugation. For example, the pili can be separated by centrifugation on a sucrose gradient.

[0083] Typically, a sample containing Gram-positive pili will contain pili oligomers of different molecular weights due to differing numbers of pilus protein subunits present in the pili. To reduce polydispersity, a sample containing Gram-positive pili can be separated by size. For example, a gel filtration or size exclusion column can be used. An ultrafiltration membrane can also be used to reduce polydispersity.

[0084] Gram-positive pili can also be isolated using affinity methods such as affinity chromatography. For example, a protein that binds specifically to a Gram-positive pilus, e.g., an antibody that binds specifically to a pilus component or an antibody that binds preferentially to pili, can be immobilized on a solid substrate (e.g., a chromatography substrate), then a sample containing Gram-positive pili can be exposed to the immobilized binding protein. Such affinity isolation methods can also be used to isolate, purify, or enrich preparations of cells that express Gram-positive pili.

[0085] Gram-positive pili can also be isolated using any other protein purification method known in the art, e.g., precipitations, column chromatography methods, and sample concentrations. Additional methods are described, e.g., in Ruffolo et al., 1997, Infect. Immun., 65:339-43. Methods of protein purification are described in detail in, e.g., Scopes, R. K., Protein Purification: Principles and Practice, 3rd. ed., 1994, Springer, N.Y.

[0086] The presence of Gram-positive pili in fractions during purification can be followed by electrophoresis (e.g., polyacrylamide electrophoresis), measuring binding of an agent that specifically binds to the gram positive pili (e.g., an antibody against a pilus protein or an antibody that binds preferentially to pili), and/or measuring an activity of the pili such as protein or cell binding.

### Antibodies

[0087] The S. pneumoniae Polypeptides described herein may also be used to prepare antibodies specific to those S. pneumoniae Polypeptides. In some embodiments the antibodies are specific to an oligomeric or hyper-oligomeric form of a S. pneumoniae Pilus Polypeptide. The compositions described herein also include combinations of antibodies specific to S. pneumoniae pilus polypeptides and other polypeptides from S. pneumoniae selected to provide protection against an increased range of serotypes and strain isolates. For example, such a combination may comprise a first and second antibody, wherein the first antibody is specific to a first S. pneumoniae Polypeptide and the second antibody is specific to a second S. pneumoniae Polypeptide or non-S. pneumoniae Polypeptide.

[0088] The specific S. pneumoniae Polypeptide antibodies described herein include one or more biological moieties that, through chemical or physical means, can bind to or associate with an epitope of a S. pneumoniae Polypeptide. The antibodies described herein include antibodies which specifically bind to a S. pneumoniae Polypeptide. The compositions described herein include antibodies obtained from both polyclonal and monoclonal preparations, as well as the following: hybrid (chimeric) antibody molecules (see, e.g., Winter et al. (1991) Nature 349: 293-299; and U.S. Pat. No. 4,816,567; F(ab′)2 and F(ab) fragments; Fv molecules (non-covalent heterodimers, see, e.g., Inbar et al. (1972) Proc Natl Acad Sci USA 69:2659-2662; and Ehrlich et al. (1980) Biochem 19:4091-4096); single-chain Fv molecules (sFv) (see, e.g., Huston et al. (1988) Proc Natl Acad Sci USA 85:5897-5883); dimeric and trimeric antibody fragment constructs; minibodies (see, e.g., Pack et al. (1992) Biochem 31:1579-1584; Cumber et al. (1992) J Immunology 149B: 120-126); humanized antibody molecules (see, e.g., Riechmann et al. (1988) Nature 332:323-327; Verhoeyan et al. (1988) Science 239:1534-1536; and U.K. Patent Publication No. GB 2,276,169, published 21 Sep. 1994); and, any functional fragments obtained from such molecules, wherein such fragments retain immunological binding properties of the parent antibody molecule. The compositions described herein further include antibodies obtained through non-conventional processes, such as phage display.

[0089] The antibodies described herein can be polyclonal, monoclonal, recombinant, e.g., chimeric or humanized, fully human, non-human, e.g., murine, or single chain antibodies. Methods of making such antibodies are known. In some cases, the antibodies have effector function and can fix complement. The antibodies can also be coupled to toxins, reporter groups, or imaging agents.

[0090] In some embodiments, the specific S. pneumoniae antibodies described herein are monoclonal antibodies. These monoclonal antibodies include an antibody composition having a homogeneous antibody population. The monoclonal antibodies described herein may be obtained from murine hybridomas, as well as human monoclonal antibodies obtained using human rather than murine hybridomas. See, e.g., Cote, et al. Monoclonal Antibodies and Cancer Therapy, Alan R. Liss, 1985, p 77.

[0091] Chimeric, humanized, e.g., completely human, antibodies are desirable for applications that include repeated administration, e.g., therapeutic treatment (and some diagnostic applications) of a human subject.

[0092] The antibodies described herein can also be used in the prophylactic or therapeutic treatment of S. pneumoniae infection. The antibodies may block the attachment or some other activity of S. pneumoniae on host cells. Additionally, the antibodies can be used to deliver a toxin or therapeutic agent such as an antibiotic to S. pneumoniae cells.

[0093] The antibodies described herein may be used in diagnostic applications, for example, to detect the presence or absence of S. pneumoniae Polypeptides in a biological sample. Anti-pili, pilus polypeptide or other polypeptide from S. pneumoniae antibodies can be used diagnostically to monitor protein levels in tissue as part of a clinical testing procedure, e.g., to determine the efficacy of a given treatment regimen. Detection can be facilitated by coupling (i.e., physically linking) the antibody to a detectable substance (i.e., antibody labeling). Examples of detectable substances include various enzymes, prosthetic groups, fluorescent materials, contrast agents, luminescent materials, bioluminescent materials, and radioactive materials. Examples of suitable enzymes include horseradish peroxidase, alkaline phosphatase, β-galactosidase, or acetylcholinesterase; examples of suitable prosthetic group complexes include streptavidin/biotin and avidin/biotin; examples of suitable fluorescent materials include umbelliferone, fluorescein, fluorescein isothiocyanate, rhodamine, dichlorotriazinylamine fluorescein, dansyl chloride or phycoerytlirin; examples of contrast agents include electron dense materials useful for electron microscopy, such as gold particles, or magnetically active materials useful for magnetic resonance imaging, such as supermagnetic iron particles; an example of a luminescent material includes luminol; examples of bioluminescent materials include luciferase, luciferin, and aequorin, and examples of suitable radioactive material include ¹²⁵I, ¹³¹I, ³⁵S or ³H. Such diagnostic antibodies can be used in methods to detect the presence of piliated S. pneumoniae containing Streptococcus pneumoniae pilus II island (INV104B) pili in an infected patient, e.g., by testing a sample from the patient. The course of treatment can then be selected based on the presence or absence of Streptococcus pneumoniae Polypeptides. For example, a patient infected with non-piliated S. pneumoniae could be treated with an antibiotic, whereas a patient infected with piliated S. pneumoniae containing S. pneumoniae Pili Polypeptides could also be treated with a pili-binding compound, such as an antibody, and/or an anti-inflammatory agent (e.g., IL-6 or an anti-TNF agent such as an anti-TNF antibody).

### Screening Assays

[0094] In some aspects, the methods described herein (also referred to herein as “screening assays”) can be used to identify modulators, i.e., candidate compounds or agents identified from one or more test compounds (e.g., antibodies, proteins, peptides, peptidomimetics, peptoids, small inorganic molecules, small non-nucleic acid organic molecules, nucleic acids (e.g., antisense nucleic acids, siRNA, oligonucleotides, or synthetic oligonucleotides), or other drugs) that inhibit an activity, e.g., a binding activity of S. pneumoniae Pili Polypeptides. Compounds thus identified can be used to modulate the binding activity of S. pneumoniae containing S. pneumoniae Pili Polypeptides or the attachment of such S. pneumoniae in a therapeutic protocol, to elaborate the biological function S. pneumoniae.

[0095] In some embodiments, assays are provided for screening test compounds to identify those that can bind to S. pneumoniae Pili Polypeptides or a portion thereof. Compounds that bind to S. pneumoniae Pili Polypeptides can be tested for their ability to modulate an activity associated with S. pneumoniae pili such as attachment, infection, or an inflammatory response.

[0096] The test compounds used in the methods described herein can be obtained using any of the numerous approaches in combinatorial library methods known in the art, including: biological libraries; peptoid libraries (libraries of molecules having the functionalities of peptides, but with a novel, non-peptide backbone, which are resistant to enzymatic degradation, but which, nevertheless, remain bioactive; see, e.g., Zuckermann et al., 1994, J. Med. Chem., 37:2678-2685); spatially addressable parallel solid phase or solution phase libraries; synthetic library methods requiring deconvolution; the “one-bead one-compound” library method; and synthetic library methods using affinity chromatography selection. The biological library and peptoid library approaches are limited to peptide libraries, while the other four approaches are applicable to peptide, non-peptide oligomer, or small molecule libraries of compounds (Lam, 1997, Anticancer Drug Des., 12:145).

[0097] Examples of methods for the synthesis of molecular libraries can be found in the art, for example in: DeWitt et al. (1993, Proc. Natl. Acad. Sci. USA, 90:6909; Erb et al., 1994, Proc. Natl. Acad. Sci. USA, 91:11422; Zuckermann et al., 1994, J. Med. Chem., 37:2678; Cho et al., 1993, Science, 261:1303; Carrell et al., 1994, Angew. Chem. Int. Ed. Engl., 33:2059; Carell et al., 1994, Angew. Chem. Int. Ed. Engl., 33:2061; and in Gallop et al., 1994, J. Med. Chem., 37:1233).

[0098] Libraries of compounds may be presented in solution (e.g., Houghten, 1992, Biotechniques, 13:412-421), or on beads (Lam, 1991, Nature, 354:82-84), chips (Fodor, 1993, Nature, 364:555-556), bacteria (Ladner, U.S. Pat. No. 5,223,409), spores (Ladner, U.S. Pat. No. 5,223,409), plasmids (Cull et al., 1992, Proc. Natl. Acad. Sci. USA, 89:1865-1869), or on phage (Scott and Smith, 1990, Science, 249:386-390; Devlin, 1990, Science, 249:404-406; Cwirla et al., 1990, Proc. Natl. Acad. Sci. USA, 87:6378-6382; Felici, 1991, J. Mol. Biol., 222:301-310; and Ladner supra).

[0099] In some embodiments, the assay is a cell-based assay in which a cell, e.g., a bacterial cell, that expresses a S. pneumoniae Polypeptides or biologically active portion thereof is contacted with a test compound, and the ability of the test compound to modulate S. pneumoniae activity is determined, for example, by monitoring cell binding. The cell, for example, can be of mammalian origin, e.g., murine, rat, or human origin. The cell can be an epithelial cell, e.g., a A549 lung epithelial cell.

[0100] The ability of the test compound to modulate S. pneumoniae Pili Polypeptides from binding to a ligand or substrate, e.g., a cell or a protein such as fibrinogen, fibronectin, or collagen can be evaluated, for example, by coupling the compound, e.g., the substrate, with a radioisotope or enzymatic label such that binding of the compound, e.g., the substrate, to S. pneumoniae pilus II island (INV104B) pili or pilus protein can be determined by detecting the labeled compound, e.g., substrate, in a complex. Alternatively, S. pneumoniae Polypeptides can be coupled with a radioisotope or enzymatic label to monitor the ability of a test compound to modulate S. pneumoniae Polypeptide binding to a substrate in a complex. For example, compounds (e.g., S. pneumoniae Polypeptide binding partners) can be labeled with ¹²⁵I, ³⁵S, ¹⁴C, or ³H, either directly or indirectly, and the radioisotope detected by direct counting of radioemission or by scintillation counting. Alternatively, compounds can be enzymatically labeled with, for example, horseradish peroxidase, alkaline phosphatase, or luciferase, and the enzymatic label detected by determination of conversion of an appropriate substrate to product.

[0101] The ability of a compound to interact with a S. pneumoniae Polypeptide with or without the labeling of any of the interactants can be evaluated. For example, a microphysiometer can be used to detect the interaction of a compound with a S. pneumoniae Polypeptide without labeling either the compound or the S. pneumoniae Polypeptide (McConnell et al., 1992, Science 257:1906-1912). As used herein, a “microphysiometer” (e.g., Cytosensor) is an analytical instrument that measures the rate at which a cell acidifies its environment using a light-addressable potentiometric sensor (LAPS). Changes in this acidification rate can be used as an indicator of the interaction between a compound and a S. pneumoniae Polypeptide.

[0102] In some embodiments, a cell-free assay is provided in which a S. pneumoniae Polypeptide or biologically active portion thereof is contacted with a test compound and the ability of the test compound to bind to the S. pneumoniae Polypeptide or biologically active portion thereof is evaluated. In general, biologically active portions of a S. pneumoniae Polypeptide to be used in the new assays include fragments that participate in interactions with other S. pneumoniae Polypeptide molecules.

[0103] Cell-free assays involve preparing a reaction mixture of the target gene protein and the test compound under conditions and for a time sufficient to allow the two components to interact and bind, thus forming a complex that can be removed and/or detected.

[0104] An interaction between two molecules can be detected using fluorescence energy transfer (FET) (see, e.g., Lakowicz et al., U.S. Pat. No. 5,631,169 and Stavrianopoulos et al., U.S. Pat. No. 4,868,103). A fluorophore label on the first ‘donor’ molecule is selected such that its emitted fluorescent energy will be absorbed by a fluorescent label on a second ‘acceptor’ molecule, which in turn is able to fluoresce due to the absorbed energy. Alternately, the ‘donor’ protein molecule may simply utilize the natural fluorescent energy of tryptophan residues. Labels are chosen that emit different wavelengths of light, such that the ‘acceptor’ molecule label may be differentiated from that of the ‘donor.’ Since the efficiency of energy transfer between the labels is related to the distance separating the molecules, the spatial relationship between the molecules can be assessed. In a situation in which binding occurs between the molecules, the fluorescent emission of the ‘acceptor’ molecule label in the assay should be maximal. An FET binding event can be conveniently measured through standard fluorometric detection means well known in the art (e.g., using a fluorimeter).

[0105] In some embodiments, determining the ability of a S. pneumoniae Polypeptide to bind to a target molecule (e.g., a fibrinogen, fibronectin, or collagen polypeptide or fragment thereof) can be accomplished using real-time Biomolecular Interaction Analysis (BIA) (e.g., Sjolander et al., 1991, Anal. Chem., 63:2338-2345 and Szabo et al., 1995, Curr. Opin. Struct. Biol., 5:699-705). “Surface plasmon resonance” or “BIA” detects biospecific interactions in real time, without labeling any of the interactants (e.g., BIAcore). Changes in the mass at the binding surface (indicative of a binding event) result in alterations of the refractive index of light near the surface (the optical phenomenon of surface plasmon resonance (SPR)), resulting in a detectable signal that can be used as an indication of real-time reactions between biological molecules.

[0106] In some embodiments, the target gene product or the test substance is anchored onto a solid phase. The target gene product/test compound complexes anchored on the solid phase can be detected at the end of the reaction. The target gene product can be anchored onto a solid surface, and the test compound, which is not anchored, can be labeled, either directly or indirectly, with a detectable labelsdiscussed herein.

[0107] Multiple target gene products can be anchored onto a solid phase using protein microarray technology, which is also known by other names including: protein chip technology and solid-phase protein array technology. Protein microarray technology is well known to those of ordinary skill in the art and is based on, but not limited to, obtaining an array of identified peptides or proteins on a fixed substrate, binding target molecules or biological constituents to the peptides, and evaluating such binding. See, e.g., G. MacBeath and S. L. Schreiber, “Printing Proteins as Microarrays for High-Throughput Function Determination,” Science 289(5485):1760-1763, 2000. Microarray substrates include but are not limited to glass, silica, aluminosilicates, borosilicates, metal oxides such as alumina and nickel oxide, various clays, nitrocellulose, or nylon. The microarray substrates may be coated with a compound to enhance synthesis of a probe (e.g., a peptide) on the substrate. Coupling agents or groups on the substrate can be used to covalently link the first amino acid to the substrate. A variety of coupling agents or groups are known to those of skill in the art. Peptide probes can be synthesized directly on the substrate in a predetermined grid. Alternatively, peptide probes can be spotted on the substrate, and in such cases the substrate may be coated with a compound to enhance binding of the probe to the substrate. In these embodiments, presynthesized probes are applied to the substrate in a precise, predetermined volume and grid pattern, preferably utilizing a computer-controlled robot to apply probe to the substrate in a contact-printing manner or in a non-contact manner such as ink jet or piezo-electric delivery. Probes may be covalently linked to the substrate. In some embodiments, one or more control peptide or protein molecules are attached to the substrate. Control peptide or protein molecules allow determination of factors such as peptide or protein quality and binding characteristics, reagent quality and effectiveness, hybridization success, and analysis thresholds and success.

[0108] In some embodiments it is desirable to immobilize a S. pneumoniae Polypeptide, an anti-pilus or pilus protein antibody, or a S. pneumoniae Polypeptide binding protein to facilitate separation of complexed from uncomplexed forms of one or both of the proteins, as well as to accommodate automation of the assay. Binding of a test compound to a S. pneumoniae Polypeptide, or interaction of a S. pneumoniae Polypeptide with a target molecule in the presence or absence of a candidate compound, can be accomplished in any vessel suitable for containing the reactants. Examples of such vessels include microtiter plates, test tubes, and micro-centrifuge tubes. In one embodiment, a fusion protein can be provided that adds a domain that allows one or both of the proteins to be bound to a matrix. For example, glutathione-S-transferase/pilus II island (INV104B) pilus protein fusion proteins or glutathione-S-transferase/target fusion proteins can be adsorbed onto glutathione Sepharose™ beads (Sigma Chemical, St. Louis, Mo.) or glutathione derivatized microtiter plates, which are then combined with the test compound or the test compound and either the non-adsorbed target protein or S. pneumoniae pilus II island (INV104B) pili or pilus protein, and the mixture incubated under conditions conducive to complex formation (e.g., at physiological conditions for salt and pH). Following incubation, the beads or microtiter plate wells are washed to remove unbound components, the matrix immobilized in the case of beads, complex determined either directly or indirectly, for example, as described above. Alternatively, the complexes can be dissociated from the matrix, and the level of S. pneumoniae Polypeptide binding or activity determined using standard techniques.

[0109] Other techniques for immobilizing either a S. pneumoniae Polypeptide or a binding target on matrices include using conjugation of biotin and streptavidin. Biotinylated S. pneumoniae Polypeptides or target molecules can be prepared from biotin-NHS (N-hydroxy-succinimide) using techniques known in the art (e.g., biotinylation kits from Pierce Chemicals, Rockford, Ill.), and immobilized in the wells of streptavidin-coated 96 well plates (Pierce Chemical).

[0110] To conduct the assay, the non-immobilized component is added to the coated surface containing the anchored component. After the reaction is complete, unreacted components are removed (e.g., by washing) under conditions such that any complexes formed will remain immobilized on the solid surface. The detection of complexes anchored on the solid surface can be accomplished in a number of ways. Where the previously non-immobilized component is pre-labeled, the detection of label immobilized on the surface indicates that complexes were formed. Where the previously non-immobilized component is not pre-labeled, an indirect label can be used to detect complexes anchored on the surface; e.g., using a labeled antibody specific for the immobilized component (the antibody, in turn, can be directly labeled or indirectly labeled with, e.g., a labeled anti-Ig antibody).

[0111] In some embodiments, the assay is performed utilizing antibodies that bind specifically to S. pneumoniae Polypeptides or binding targets, but do not interfere with binding of the S. pneumoniae Polypeptide to its target. Such antibodies can be derivatized to the wells of the plate, and unbound target or S. pneumoniae Polypeptide trapped in the wells by antibody conjugation. Methods for detecting such complexes, in addition to those described above for the GST-immobilized complexes, include immunodetection of complexes using antibodies reactive with the S. pneumoniae Polypeptide or target molecule, as well as enzyme-linked assays which rely on detecting an enzymatic activity associated with the S. pneumoniae Polypeptide or target molecule.

[0112] In some embodiments, cell-free assays can be conducted in a liquid phase. In such an assay, the reaction products are separated from unreacted components, by any of a number of standard techniques, including but not limited to: differential centrifugation (for example, Rivas et al., 1993, Trends Biochem. Sci., 18:284-287); chromatography (gel filtration chromatography, ion-exchange chromatography); electrophoresis (e.g., Ausubel et al., eds., 1999, Current Protocols in Molecular Biology, J. Wiley: New York.); and immunoprecipitation (for example, Ausubel et al., eds., 1999, Current Protocols in Molecular Biology, J. Wiley: New York). Such resins and chromatographic techniques are known to those skilled in the art (e.g., Heegaard, 1998, J. Mol. Recognit., 11:141-148 and Hage et al., 1997, J. Chromatogr. B. Biomed. Sci. Appl., 699:499-525). Further, fluorescence energy transfer may also be conveniently utilized, as described herein, to detect binding without further purification of the complex from solution.

[0113] In some embodiments, the assay includes contacting a S. pneumoniae Pili Polypeptide, or biologically active portion thereof with a known cell or compound (e.g., a protein) that binds to S. pneumoniae Pili Polypeptide, to form an assay mixture, contacting the assay mixture with a test compound, and determining the ability of the test compound to affect binding of the S. pneumoniae Pili Polypeptide to the cell or compound.

[0114] A general assay for binding of bacterial cells that express S. pneumoniae pilus II island (INV104B) pili involves incubating bacterial cells that express S. pneumoniae pilus II island (INV104B) pili with A549 lung epithelial cells, washing to remove nonadherent bacterial cells, and detecting adherent bacterial cells. Bacterial adherence can be measured by any means in the art, e.g., detecting binding of an antibody to the adherent bacterial cells or lysing the epithelial cells and counting the number of associated bacterial cells. HEP2 cells, CHO cells, or HeLa cells can also be used in assays of binding of bacterial cells that express S. pneumoniae pilus II island (INV104B) pili.

### Immunogenic Compositions

[0115] Immunogenic compositions described herein that include S. pneumoniae Polypeptides may further comprise one or more antigenic agents. Exemplary antigens include those listed below. Additionally, the compositions described herein may be used to treat or prevent infections caused by any of the below-listed microbes. Antigens for use in the immunogenic compositions include, but are not limited to, one or more of the following set forth below, or antigens derived from one or more of the following set forth below:

### Bacterial Antigens

[0116] N. meningitidis: a protein antigen from N. meningitides serogroup A, C, W135, Y, and/or B (Bruyn, G. A. W. & van Furth, R. (1991) Eur. J. Clin. Microbiol. Infect. Dis. 10, 897-910; Ryan, M. W. & Antonelli, P. J. (2000) Laryngoscope 110, 961-964; Cutts, F. T., Zaman, S. M., Enwere, G., Jaffar, S., Levine, O, S., Okoko, C. Oluwalana, A., Vaughan, S., Obaro, A., Leach, A., et al. (2005) Lancet 365, 1139-1146; Swiatlo, E., Champlin, F. R., Holman, S. C., Wilson, W. W.&Watt, J. M. (2002) Infect. Immun. 70, 412-415; Sandgren, A., Albiger, B., Orihuela, C., Tuomanen, E., Normark, S. & Henriques-Normark, B. (2005) J. Infect. Dis. 192, 791-800; Henriques Normark, B., Christensson, B., Sandgren, A., Noreen, B., Sylvan, S., Burman, L. G. & Olsson-Liljequist, B. (2003) Microb. Drug Resist. 9, 337-344; Nunes, S., Sá-, Leão, R., Carriço, J., Alves, C. R., Mato, R., Avô, A. B., Saldanha, J., Almeida, J. S., Sanches, I. S. & de Lencastre, H. (2005) J. Clin. Microbiol. 43, 1285-1293); an outer-membrane vesicle (OMV) preparation from N. meningitides serogroup B. (Henrichsen, J. (1995) J. Clin. Microbiol. 33, 2759-2762; Lau, G. W., Haataja, S., Lonetto, M., Kensit, S. E., Marra, A., Bryant, A. P., McDevitt, D., Morrison, D. A. & Holden, D. W. (2001) Mol. Microbiol. 40, 555-571; Rosenow, C., Ryan, P., Weiser, J. N., Johnson, S., Fontan, P., Ortqvist, A. & Masure, H. R. (1997) Mol. Microbiol. 25, 819-829; Tuomanen, E. (1999) Current Opin. Biol. 2, 35-39); a saccharide antigen, including LPS, from N. meningitides serogroup A, B, C W135 and/or Y, such as the oligosaccharide from serogroup C (see PCT/US99/09346; PCT IB98/01665; and PCT IB99/00103);

[0117] Streptococcus pneumoniae: a saccharide or protein antigen, particularly a saccharide from Streptococcus pneumoniae or a protein or antigenic peptide of PhtD (BVH-11-2, SP1003, spr0907) (Adamou et al., Infect. Immun., 69:949-53, 2001; Hamel et al., Infect. Immun., 72:2659-70, 2004); PhtE (BVH-3, SP1004, spr0908) (Adamou et al., Infect. Immun., 69:949-53, 2001; Hamel et al., Infect. Immun., 72:2659-70, 2004); PhtB (PhpA, BVH-11, SP1174, Spr1060) (Adamou et al., Infect. Immun., 69:949-53, 2001; Zhang et al., Infect. Immun., 69:3827-36, 2001; Hamel et al., Infect. Immun., 72:2659-70, 2004); PhtA (BVH-11-3, SP1175, sprl 061) (Adamou et al., Infect. Immun., 69:949-53, 2001; Wizemann et al., Infect. Immun., 69:1593-98, 2001; Zhang et al., Infect. Immun., 69:3827-36, 2001; Hamel et al., Infect. Immun., 72:2659-70, 2004); NanA (SP1693, spr1536) (Tong et al., Infect. Immun., 73:7775-78, 2005); SP1872 (spr1687) (Brown et al., Infect. Immun., 69:6702-06, 2001); PspC (CbpA, SP2190, spr1995) (Ogunniyi et al., Infect. Immun., 69:5997-6003, 2001); PspA (SP0177, spr0121, spr1274) (Briles et al., Vaccine, 19:S87-S95, 2001); SP0498 (spr0440); LytB (SP0965, spr0867) (Wizemann et al., Infect. Immun., 69:1593-98, 2001); AliB (SP1527, spr1382); PpmA (SP0981, spr0884) (Overweg et al., Infect. Immun., 68:4180-4188, 2000); LytC(SP1573, spr1431) (Wizemann et al., Infect. Immun., 69:1593-98, 2001); PsaA (Briles et al., Vaccine, 19:S87-S95, 2001); PdB (Ogunniyi et al., Infect. Immun., 69:5997-6003, 2001); RPhp (Zhang et al., Infect. Immun., 69:3827-36, 2001); PiuA (Jomaa et al., Vaccine, 24:5133-39, 2006); PiaA (Jomaa et al., Vaccine, 24:5133-39, 2006); 6PGD (Daniely et al., Clin. Exp. Immunol., 144:254-263, 2006); or PppA (Green et al., Infect. Immun., 73:981-89, 2005);

[0118] Streptococcus agalactiae: such as, Group B streptococcus antigens;

[0119] Streptococcus pyogenes: such as, Group A streptococcus antigens;

[0120] Enterococcus faecalis or Enterococcus faecium: such as, a trisaccharide repeat or other Enterococcus derived antigens provided in U.S. Pat. No. 6,756,361;

[0121] Helicobacter pylori: including: Cog, Vac, Nap, HopX, HopY and/or urease antigen;

[0122] Bordetella pertussis: such as pertussis holotoxin (PT) and filamentous hemagglutinin (FHA) from B. pertussis, optionally also combination with pertactin and/or agglutinogens 2 and 3 antigen;

[0123] Staphylococcus aureus: including S. aureus type 5 and 8 capsular polysaccharides optionally conjugated to nontoxic recombinant Pseudomonas aeruginosa exotoxin A, such as StaphVAX™, or antigens derived from surface proteins, invasins (leukocidin, kinases, hyaluronidase), surface factors that inhibit phagocytic engulfment (capsule, Protein A), carotenoids, catalase production, Protein A, coagulase, clotting factor, and/or membrane-damaging toxins (optionally detoxified) that lyse eukaryotic cell membranes (hemolysins, leukotoxin, leukocidin);

[0124] Staphylococcus epidermis: particularly, S. epidermidis slime-associated antigen (SAA);

[0125] Staphylococcus saprophyticus: (causing urinary tract infections) particularly the 160 kDa hemagglutinin of S. saprophyticus antigen;

[0126] Pseudomonas aeruginosa: particularly, endotoxin A, Wzz protein, P. aeruginosa LPS, more particularly LPS isolated from PAO1 (O5 serotype), and/or Outer Membrane Proteins, including Outer Membrane Proteins F (OprF) (Infect Immun. 2001 May; 69(5): 3510-3515);

[0127] Bacillus anthracis (anthrax): such as B. anthracis antigens (optionally detoxified) from A-components (lethal factor (LF) and edema factor (EF)), both of which can share a common B-component known as protective antigen (PA);

[0128] Moraxella catarrhalis: (respiratory) including outer membrane protein antigens (HMW-OMP), C-antigen, and/or LPS;

[0129] Yersinia pestis (plague): such as F1 capsular antigen (Infect Immun. 2003 January; 71(1)): 374-383, LPS (Infect Immun. 1999 October; 67(10): 5395), Yersinia pestis V antigen (Infect Immun. 1997 November; 65(11): 4476-4482);

[0130] Yersinia enterocolitica (gastrointestinal pathogen): particularly LPS (Infect Immun. 2002 August; 70(8): 4414);

[0131] Yersinia pseudotuberculosis: gastrointestinal pathogen antigens;

[0132] Mycobacterium tuberculosis: such as lipoproteins, LPS, BCG antigens, a fusion protein of antigen 85B (Ag85B) and/or ESAT-6 optionally formulated in cationic lipid vesicles (Infect Immun. 2004 October; 72(10): 6148), Mycobacterium tuberculosis (Mtb) isocitrate dehydrogenase associated antigens (Proc. Natl. Acad Sci U.S.A. 2004 Aug. 24; 101(34): 12652), and/or MPT51 antigens (Infect Immun. 2004 July; 72(7): 3829);

[0133] Legionella pneumophila (Legionnaires' Disease): L. pneumophila antigens—optionally derived from cell lines with disrupted asd genes (Infect Immun. 1998 May; 66(5): 1898);

[0134] Rickettsia: including outer membrane proteins, including the outer membrane protein A and/or B (OmpB) (Biochem Biophys Acta. 2004 Nov. 1; 1702(2):145), LPS, and surface protein antigen (SPA) (J Autoimmun. 1989 June; 2 Suppl:81);

[0135] E. coli: including antigens from enterotoxigenic E. coli (ETEC), enteroaggregative E. coli (EAggEC), diffusely adhering E. coli (DAEC), enteropathogenic E. coli (EPEC), and/or enterohemorrhagic E. coli (EHEC);

[0136] Vibrio cholerae: including proteinase antigens, LPS, particularly lipopolysaccharides of Vibrio cholerae II, O1 Inaba O-specific polysaccharides, V. cholera O139, antigens of IEM108 vaccine (Infect Immun. 2003 October; 71(10):5498-504), and/or Zonula occludens toxin (Zot);

[0137] Salmonella typhi (typhoid fever): including capsular polysaccharides preferably conjugates (Vi, i.e. vax-TyVi);

[0138] Salmonella typhimurium (gastroenteritis): antigens derived therefrom are contemplated for microbial and cancer therapies, including angiogenesis inhibition and modulation of flk;

[0139] Listeria monocytogenes (systemic infections in immunocompromised or elderly people, infections of fetus): antigens derived from L. monocytogenes are preferably used as carriers/vectors for intracytoplasmic delivery of the conjugates/associated compositions described herein;

[0140] Porphyromonas gingivalis: such as, P. gingivalis outer membrane protein (OMP);

[0141] Tetanus: such as tetanus toxoid (TT) antigens, e.g., used as a carrier protein in conjunction/conjugated with the compositions described herein;

[0142] Diphtheria: such as a diphtheria toxoid or a diphtheria toxoid mutant, e.g., CRM₁₉₇, additionally antigens capable of modulating, inhibiting or associated with ADP ribosylation are contemplated for combination/co-administration/conjugation with the compositions described herein, the diphtheria toxoids can be used as carrier proteins;

[0143] Borrelia burgdorferi (Lyme disease): such as antigens associated with P39 and P13 (an integral membrane protein, Infect Immun. 2001 May; 69(5): 3323-3334), VlsE Antigenic Variation Protein (J Clin Microbiol. 1999 December; 37(12): 3997);

[0144] Haemophilus influenzae B: such as a saccharide antigen therefrom;

[0145] Klebsiella: such as an OMP, including OMP A, or a polysaccharide optionally conjugated to tetanus toxoid;

[0146] Neiserria gonorrhoeae: including, a Por (or porin) protein, such as PorB (see Zhu et al., Vaccine (2004) 22:660-669), a transferring binding protein, such as TbpA and TbpB (see Price et al., Infection and Immunity (2004) 71(1):277-283), a opacity protein (such as Opa), a reduction-modifiable protein (Rmp), and outer membrane vesicle (OMV) preparations (see Plante et al., J Infectious Disease (2000) 182:848-855), also see, e.g., WO99/24578, WO99/36544, WO99/57280, WO02/079243);

[0147] Chlamydia pneumoniae: particularly C. pneumoniae protein antigens;

[0148] Chlamydia trachomatis: including antigens derived from serotypes A, B, Ba and C are (agents of trachoma, a cause of blindness), serotypes L₁, L₂ & L₃ (associated with Lymphogranuloma venereum), and serotypes, D-K;

[0149] Treponema pallidum (Syphilis): particularly a TmpA antigen; and

[0150] Haemophilus ducreyi (causing chancroid): including outer membrane protein (DsrA).

[0151] Where not specifically referenced, further bacterial antigens as described herein may be capsular antigens, polysaccharide antigens or protein antigens of any of the above. Further bacterial antigens may also include an outer membrane vesicle (OMV) preparation. Additionally, antigens include live, attenuated, split (for enveloped viruses), and/or purified versions of any of the aforementioned bacteria. The bacterial or microbial derived antigens described herein may be gram-negative or gram-positive and aerobic or anaerobic.

[0152] Additionally, any of the above bacterial-derived saccharides (polysaccharides, LPS, LOS or oligosaccharides) can be conjugated to another agent or antigen, such as a carrier protein (for example CRM₁₉₇). Such conjugation may be direct conjugation effected by reductive amination of carbonyl moieties on the saccharide to amino groups on the protein, as provided in U.S. Pat. No. 5,360,897 and Can J Biochem Cell Biol. 1984 May; 62(5):270-5. Alternatively, the saccharides can be conjugated through a linker, such as, with succinamide or other linkages provided in Bioconjugate Techniques, 1996 and CRC, Chemistry of Protein Conjugation and Cross-Linking, 1993.

### Viral Antigens

[0153] Influenza: including whole viral particles (attenuated), split, or subunit comprising hemagglutinin (HA) and/or neuraminidase (NA) surface proteins, the influenza antigens may be derived from chicken embryos or propagated on cell culture, and/or the influenza antigens are derived from influenza type A, B, and/or C, among others;

[0154] Respiratory syncytial virus (RSV): including the F protein of the A2 strain of RSV (J Gen Virol. 2004 November; 85(Pt 11):3229) and/or G glycoprotein;

[0155] Parainfluenza virus (PIV): including PIV type 1, 2, and 3, preferably containing hemagglutinin, neuraminidase and/or fusion glycoproteins;

[0156] Poliovirus: including antigens from a family of picornaviridae, preferably poliovirus antigens such as OPV or, preferably IPV;

[0157] Measles: including split measles virus (MV) antigen optionally combined with the Protollin and or antigens present in MMR vaccine;

[0158] Mumps: including antigens present in MMR vaccine;

[0159] Rubella: including antigens present in MMR vaccine as well as other antigens from Togaviridae, including dengue virus;

[0160] Rabies: such as lyophilized inactivated virus (RabAvert™);

[0161] Flaviviridae viruses: such as (and antigens derived therefrom) yellow fever virus, Japanese encephalitis virus, dengue virus (types 1, 2, 3, or 4), tick borne encephalitis virus, and West Nile virus;

[0162] Caliciviridae; antigens therefrom;

[0163] HIV: including HIV-1 or HIV-2 strain antigens, such as gag (p24gag and p55gag), env (gp160 and gp41), pol, tat, nef, rev vpu, miniproteins, (preferably p55 gag and gp140v delete) and antigens from the isolates HIV_{IIIb}, HIV_{SF2}, HIV_{LAV}, HIV_{LAI}, HIV_{MN}, HIV-1_{CM235}, HIV-1_{US4}, HIV-2; simian immunodeficiency virus (SW) among others;

[0164] Rotavirus: including VP4, VP5, VP6, VP7, VP8 proteins (Protein Expr Purif. 2004 December; 38(2):205) and/or NSP4;

[0165] Pestivirus: such as antigens from classical porcine fever virus, bovine viral diarrhea virus, and/or border disease virus;

[0166] Parvovirus: such as parvovirus B19;

[0167] Coronavirus: including SARS virus antigens, particularly spike protein or proteases therefrom, as well as antigens included in WO 04/92360;

[0168] Hepatitis A virus: such as inactivated virus;

[0169] Hepatitis B virus: such as the surface and/or core antigens (sAg), as well as the presurface sequences, pre-S1 and pre-S2 (formerly called pre-S), as well as combinations of the above, such as sAg/pre-S1, sAg/pre-S2, sAg/pre-S1/pre-S2, and pre-S1/pre-S2, (see, e.g., AHBV Vaccines—Human Vaccines and Vaccination, pp. 159-176; and U.S. Pat. Nos. 4,722,840, 5,098,704, 5,324,513; Beames et al., J. Virol. (1995) 69:6833-6838, Birnbaum et al., J. Virol. (1990) 64:3319-3330; and Zhou et al., J. Virol. (1991) 65:5457-5464);

[0170] Hepatitis C virus: such as E1, E2, E1/E2 (see, Houghton et al., Hepatology (1991) 14:381), NS345 polyprotein, NS 345-core polyprotein, core, and/or peptides from the nonstructural regions (International Publication Nos. WO 89/04669; WO 90/11089; and WO 90/14436);

[0171] Delta hepatitis virus (HDV): antigens derived therefrom, particularly 8-antigen from HDV (see, e.g., U.S. Pat. No. 5,378,814);

[0172] Hepatitis E virus (HE V); antigens derived therefrom;

[0173] Hepatitis G virus (HGV); antigens derived therefrom;

[0174] Varcicella zoster virus: antigens derived from varicella zoster virus (VZV) (J. Gen. Virol. (1986) 67:1759);

[0175] Epstein-Barr virus: antigens derived from EBV (Baer et al., Nature (1984) 310:207);

[0176] Cytomegalovirus: CMV antigens, including gB and gH (Cytomegaloviruses (J. K. McDougall, ed., Springer-Verlag 1990) pp. 125-169);

[0177] Herpes simplex virus: including antigens from HSV-1 or HSV-2 strains and glycoproteins gB, gD and gH (McGeoch et al., J. Gen. Virol. (1988) 69:1531 and U.S. Pat. No. 5,171,568);

[0178] Human Herpes Virus: antigens derived from other human herpesviruses such as HHV6 and HHV7; and

[0179] HPV: including antigens associated with or derived from human papillomavirus (HPV), for example, one or more of E1-E7, L1, L2, and fusions thereof, particularly the compositions described herein may include a virus-like particle (VLP) comprising the L1 major capsid protein, more particular still, the HPV antigens are protective against one or more of HPV serotypes 6, 11, 16 and/or 18.

[0180] Further provided are antigens, compositions, methods, and microbes included in Vaccines, 4^{th} Edition (Plotkin and Orenstein ed. 2004); Medical Microbiology 4^{th} Edition (Murray et al. ed. 2002); Virology, 3rd Edition (W. K. Joklik ed. 1988); Fundamental Virology, 2nd Edition (B. N. Fields and D. M. Knipe, eds. 1991), which are contemplated in conjunction with the compositions described herein.

[0181] Additionally, antigens include live, attenuated, split, and/or purified versions of any of the aforementioned viruses.

### Fungal Antigens

[0182] Fungal antigens for use herein that are associated with vaccines include those described in: U.S. Pat. Nos. 4,229,434 and 4,368,191 for prophylaxis and treatment of trichopytosis caused by Trichophyton mentagrophytes; U.S. Pat. Nos. 5,277,904 and 5,284,652 for a broad spectrum dermatophyte vaccine for the prophylaxis of dermatophyte infection in animals, such as guinea pigs, cats, rabbits, horses and lambs, these antigens comprises a suspension of killed T. equinum, T. mentagrophytes (var. granulare), M. canis and/or M. gypseum in an effective amount optionally combined with an adjuvant; U.S. Pat. Nos. 5,453,273 and 6,132,733 for a ringworm vaccine comprising an effective amount of a homogenized, formaldehyde-killed fungi, i.e. Microsporum canis culture in a carrier; and U.S. Pat. No. 5,948,413 involving extracellular and intracellular proteins for pythiosis. Additional antigens identified within antifungal vaccines include Ringvac bovis LTF-130 and Bioveta.

[0183] Further, fungal antigens for use herein may be derived from Dermatophytres, including: Epidermophyton floccusum, Microsporum audouini, Microsporum canis, Microsporum distortum, Microsporum equinum, Microsporum gypsum, Microsporum nanum, Trichophyton concentricum, Trichophyton equinum, Trichophyton gallinae, Trichophyton gypseum, Trichophyton megnini, Trichophyton mentagrophytes, Trichophyton quinckeanum, Trichophyton rubrum, Trichophyton schoenleini, Trichophyton tonsurans, Trichophyton verrucosum, T. verrucosum var. album, var. discoides, var. ochraceum, Trichophyton violaceum, and/or Trichophyton faviforme.

[0184] Fungal pathogens for use as antigens or in derivation of antigens in conjunction with the compositions described herein comprise Aspergillus fumigatus, Aspergillus flavus, Aspergillus niger, Aspergillus nidulans, Aspergillus terreus, Aspergillus sydowi, Aspergillus flavatus, Aspergillus glaucus, Blastoschizomyces capitatus, Candida albicans, Candida enolase, Candida tropicalis, Candicla glabrata, Candida krusei, Candida parapsilosis, Candida stellatoidea, Candida kusei, Candida parakwsei, Candida lusitaniae, Candida pseudotropicalis, Candida guilliermondi, Cladosporium carrionii, Coccidioides immitiS, Blastomyces dermaticlis, Cryptococcus neoformans, Geotrichum clavatum, Histoplasma capsulation, Paracoccidioides brasiliensis, Pneumocystis carinii, Pythiumn insidiosum, Pityrosporum ovale, Sacharomyces cerevisae, Saccharomyces boulardii, Saccharomyces pombe, Scedosporium apiosperum, Sporothrix schenckii, Trichosporon beigelii, Penicillium marneffei, Malassezia spp., Fonsecaea spp., Wangiella spp., Sporothrix spp., Basidiobolus spp., Conidiobolus spp., Rhizopus spp, Mucor spp, Absidia spp, Mortierella spp, Cunninghamella spp, and Saksenaea spp.

[0185] Other fungi from which antigens are derived include Alternaria spp, Curvularia spp, Helminthosporium spp, Fusarium spp, Aspergillus spp, Penicillium spp, Monolinia spp, Rhizoctonia spp, Paecilomyces spp, Pithomyces spp, and Cladosporium spp.

[0186] Processes for producing fungal antigens are well known in the art (see U.S. Pat. No. 6,333,164). In some methods a solubilized fraction extracted and separated from an insoluble fraction obtainable from fungal cells of which cell wall has been substantially removed or at least partially removed, characterized in that the process comprises: obtaining living fungal cells; obtaining fungal cells of which cell wall has been substantially removed or at least partially removed; bursting the fungal cells of which cell wall has been substantially removed or at least partially removed; obtaining an insoluble fraction; and extracting and separating a solubilized fraction from the insoluble fraction.

### STD Antigens

[0187] In some embodiments, microbes (bacteria, viruses and/or fungi) against which the present compositions and methods can be implement include those that cause sexually transmitted diseases (STDs) and/or those that display on their surface an antigen that can be the target or antigen composition as described herein. In some embodiment, compositions are combined with antigens derived from a viral or bacterial STD. Antigens derived from bacteria or viruses can be administered in conjunction with the compositions described herein to provide protection against at least one of the following STDs, among others: chlamydia, genital herpes, hepatitis (particularly HCV), genital warts, gonorrhea, syphilis and/or chancroid (see, WO00/15255).

[0188] In some embodiments, the compositions described herein are co-administered with one or more antigens for the prevention or treatment of an STD.

[0189] Antigens derived from the following viruses associated with STDs, which are described in greater detail above, are preferred for co-administration with the compositions described herein: hepatitis (particularly HCV), HPV, HIV, or HSV.

[0190] Additionally, antigens derived from the following bacteria associated with STDs, which are described in greater detail above, are preferred for co-administration with the compositions described herein: Neiserria gonorrhoeae, Chlamydia pneumoniae, Chlamydia trachomatis, Treponema pallidum, or Haemophilus ducreyi.

### Respiratory Antigens

[0191] The S. pneumoniae antigen may be a respiratory antigen and could further be used in an immunogenic composition for methods of preventing and/or treating infection by a respiratory pathogen, including a virus, bacteria, or fungi such as respiratory syncytial virus (RSV), PIV, SARS virus, influenza, Bacillus anthracis, particularly by reducing or preventing infection and/or one or more symptoms of respiratory virus infection. A composition comprising an antigen described herein, such as one derived from a respiratory virus, bacteria or fungus is administered in conjunction with the compositions described herein to an individual which is at risk of being exposed to that particular respiratory microbe, has been exposed to a respiratory microbe or is infected with a respiratory virus, bacteria or fungus. The composition(s) described herein is/are co-administered at the same time or in the same formulation with one or more antigens of the respiratory pathogen. Administration of the composition results in reduced incidence and/or severity of one or more symptoms of respiratory infection.

### Pediatric/Geriatric Antigens

[0192] In some embodiments, the compositions described herein are used in conjunction with one or more antigens for treatment of a pediatric population, as in a pediatric antigen. In some embodiments, the age of the subjects in the pediatric population is less than about 3 years old, or less than about 2 years, or less than about 1 years old. In some embodiments the pediatric antigen (in conjunction with the composition described herein) is administered multiple times over at least 1, 2, or 3 years.

[0193] In some embodiments, the compositions described herein are used in conjunction with one or more antigens for treatment of a geriatric population, as in a geriatric antigen. In some embodiments, the age of the subjects in the geriatric population is greater than about 50 years old, greater than about 55 years old, greater than about 60 years old, greater than about 65 years old, greater than about 70 years old, greater than about 75 years old, greater than about 80 years old, or greater than about 85 years old. In some embodiments the geriatric antigen (in conjunction with the composition described herein) is administered multiple times over at least 1, 2, or 3 years.

### Other Antigens

[0194] Other antigens for use in conjunction with the compositions of the present include hospital acquired (nosocomial) associated antigens.

[0195] In some embodiments, parasitic antigens are contemplated in conjunction with the compositions described herein. Examples of parasitic antigens include those derived from organisms causing malaria and/or Lyme disease.

[0196] In some embodiments, the antigens in conjunction with the compositions described herein are associated with or effective against a mosquito born illness. In some embodiments, the antigens in conjunction with the compositions described herein are associated with or effective against encephalitis. In some embodiments the antigens in conjunction with the compositions described herein are associated with or effective against an infection of the nervous system.

[0197] In some embodiments, the antigens in conjunction with the compositions described herein are antigens transmissible through blood or body fluids.

### Antigen Formulations

[0198] In some aspects, methods of producing microparticles having adsorbed antigens are provided. The methods comprise: (a) providing an emulsion by dispersing a mixture comprising (i) water, (ii) a detergent, (iii) an organic solvent, and (iv) a biodegradable polymer selected from the group consisting of a poly(α-hydroxy acid), a polyhydroxy butyric acid, a polycaprolactone, a polyorthoester, a polyanhydride, and a polycyanoacrylate. The polymer is typically present in the mixture at a concentration of about 1% to about 30% relative to the organic solvent, while the detergent is typically present in the mixture at a weight-to-weight detergent-to-polymer ratio of from about 0.00001:1 to about 0.1:1 (more typically about 0.0001:1 to about 0.1:1, about 0.001:1 to about 0.1:1, or about 0.005:1 to about 0.1:1); (b) removing the organic solvent from the emulsion; and (c) adsorbing an antigen on the surface of the microparticles. In some embodiments, the biodegradable polymer is present at a concentration of about 3% to about 10% relative to the organic solvent.

[0199] In some embodiments, microparticles for use herein are formed from materials that are sterilizable, non-toxic and biodegradable. Such materials include, without limitation, poly(α-hydroxy acid), polyhydroxybutyric acid, polycaprolactone, polyorthoester, polyanhydride, PACA, and polycyanoacrylate. In some embodiments, microparticles for use with the methods described herein are derived from a poly(α-hydroxy acid), in particular, from a poly(lactide) (“PLA”) or a copolymer of D,L-lactide and glycolide or glycolic acid, such as a poly(D,L-lactide-co-glycolide) (“PLG” or “PLGA”), or a copolymer of D,L-lactide and caprolactone. The microparticles may be derived from any of various polymeric starting materials which have a variety of molecular weights and, in the case of the copolymers such as PLG, a variety of lactide:glycolide ratios, the selection of which will be largely a matter of choice, depending in part on the coadministered macromolecule. These parameters are discussed more fully below.

[0200] Further antigens may also include an outer membrane vesicle (OMV) preparation.

[0201] Antigens can also be adsorbed to peptidoglycans of various gram-positive bacteria to make gram-positive enhancer matrix (GEM) particles, as described in Bosma et al., Appl. Env. Microbiol., 72:880-889, 2006, the entire contents of which are incorporated herein by reference. This method relies on the non-covalent binding of the LysM motif (Buist et al., J. Bact., 177:1554-63, 1995; Bateman and Bycroft, J. Mol. Biol., 299:1113-19, 2000) to the cell wall peptidoglycan of acid-treated cells. Briefly, a polypeptide antigen linked to one or more LysM motifs (e.g., non-covalently or covalently (e.g., as a fusion protein or by conjugation) is added to acid-treated gram-positive bacteria. The antigen peptides bind with high affinity and can be used in immunogenic compositions. Exemplary acids used in these methods include trichloroacetic acid (e.g., at 0.1%-10%), acetic acid (e.g., at 5.6 M), HCl (e.g., at 0.01 M), lactic acid (e.g., at 0.72 M), and formic acid (e.g., at 0.56 M).

[0202] Additional formulation methods and antigens (especially tumor antigens) are provided in U.S. Pat. No. 6,884,435.

### Antigen References

[0203] The following references, each of which is specifically incorporated by reference in its entirety, include antigens useful in conjunction with the compositions described herein:
[0204] International patent application WO99/24578
[0205] International patent application WO99/36544.
[0206] International patent application WO99/57280.
[0207] International patent application WO00/22430.
[0208] Tettelin et al. (2000) Science 287:1809-1815.
[0209] International patent application WO96/29412.
[0210] Pizza et al. (2000) Science 287:1816-1820.
[0211] PCT WO 01/52885.
[0212] Bjune et al. (1991) Lancet 338(8775).
[0213] Fuskasawa et al. (1999) Vaccine 17:2951-2958.
[0214] Rosenqist et al. (1998) Dev. Biol. Strand 92:323-333.
[0215] Costantino et al. (1992) Vaccine 10:691-698.
[0216] Costantino et al. (1999) Vaccine 17:1251-1263.
[0217] Watson (2000) Pediatr Infect Dis J 19:331-332.
[0218] Rubin (20000) Pediatr Clin North Am 47:269-285, v.
[0219] Jedrzejas (2001) Microbiol Mol Biol Rev 65:187-207.
[0220] International patent application filed on 3 Jul. 2001 claiming priority from GB0016363.4; WO 02/02606; PCT IB/01/00166.
[0221] Kalman et al. (1999) Nature Genetics 21:385-389.
[0222] Read et al. (2000) Nucleic Acids Res 28:1397-406.
[0223] Shirai et al. (2000) J. Infect. Dis 181(Suppl 3):S524-S527.
[0224] International patent application WO99/27105.
[0225] International patent application WO00/27994.
[0226] International patent application WO00/37494.
[0227] International patent application WO99/28475.
[0228] Bell (2000) Pediatr Infect Dis J 19:1187-1188.
[0229] Iwarson (1995) APMIS 103:321-326.
[0230] Gerlich et al. (1990) Vaccine 8 Suppl:S63-68 & 79-80.
[0231] Hsu et al. (1999) Clin Liver Dis 3:901-915.
[0232] Gastofsson et al. (1996) N. Engl. J. Med. 334-:349-355.
[0233] Rappuoli et al. (1991) TIBTECH 9:232-238.
[0234] Vaccines (1988) eds. Plotkin & Mortimer. ISBN 0-7216-1946-0.
[0235] Del Guidice et al. (1998) Molecular Aspects of Medicine 19:1-70.
[0236] International patent application WO93/018150.
[0237] International patent application WO99/53310.
[0238] International patent application WO98/04702.
[0239] Ross et al. (2001) Vaccine 19:135-142.
[0240] Sutter et al. (2000) Pediatr Clin North Am 47:287-308.
[0241] Zimmerman & Spann (1999) Am Fan Physician 59:113-118, 125-126.
[0242] Dreensen (1997) Vaccine 15 Suppl“S2-6.
[0243] MMWR Morb Mortal Wkly rep 1998 January 16:47(1):12, 9.
[0244] McMichael (2000) Vaccinel 9 Suppl 1:S101-107.
[0245] Schuchat (1999) Lancet 353(9146):51-6.
[0246] GB patent applications 0026333.5, 0028727.6 & 0105640.7.
[0247] Dale (1999) Infect Disclin North Am 13:227-43, viii.
[0248] Ferretti et al. (2001) PNAS USA 98: 4658-4663.
[0249] Kuroda et al. (2001) Lancet 357(9264):1225-1240; see also pages 1218-1219.
[0250] Ramsay et al. (2001) Lancet 357(9251):195-196.
[0251] Lindberg (1999) Vaccine 17 Suppl 2:S28-36.
[0252] Buttery & Moxon (2000) J R Coil Physicians Long 34:163-168.
[0253] Ahmad & Chapnick (1999) Infect Dis Clin North Am 13:113-133, vii.
[0254] Goldblatt (1998) J. Med. Microbiol. 47:663-567.
[0255] European patent 0 477 508.
[0256] U.S. Pat. No. 5,306,492.
[0257] International patent application WO98/42721.
[0258] Conjugate Vaccines (eds. Cruse et al.) ISBN 3805549326, particularly vol. 10:48-114.
[0259] Hermanson (1996) Bioconjugate Techniques ISBN: 012323368 & 012342335X.
[0260] European patent application 0372501.
[0261] European patent application 0378881.
[0262] European patent application 0427347.
[0263] International patent application WO93/17712.
[0264] International patent application WO98/58668.
[0265] European patent application 0471177.
[0266] International patent application WO00/56360.
[0267] International patent application WO00/67161.

### Fusion Proteins

[0268] The S. pneumoniae polypeptides used with the compositions described herein may be present in the compositions as individual separate polypeptides, but in some embodiments at least two (i.e. 2, 3, 4, 5, 6, 7, 8, 9, 10, 11, 12, 13, 14, 15, 16, 17, or 18) of the antigens can be expressed as a single polypeptide chain (a “hybrid” or “fusion” polypeptide). Such fusion polypeptides offer two principal advantages: first, a polypeptide that may be unstable or poorly expressed on its own can be assisted by adding a suitable fusion partner that overcomes the problem; second, commercial manufacture is simplified as only one expression and purification need be employed in order to produce two polypeptides which are both antigenically useful.

[0269] The fusion polypeptide may comprise one or more polypeptide sequences encoded by the S. pneumoniae Polypeptides as identified herein. Accordingly, the compositions described herein may include a fusion peptide comprising a first amino acid sequence and a second amino acid sequence, wherein said first and second amino acid sequences are selected from a protein encoded by the S. pneumoniae pilus II island (INV104B) or a fragment thereof. In some embodiments, the first and second amino acid sequences in the fusion polypeptide comprise different epitopes.

[0270] In some embodiments, hybrids (or fusions) consisting of amino acid sequences from two, three, four, five, six, seven, eight, nine, or ten antigens encoded by the S. pneumoniae Polypeptide sequences discussed herein are preferred. In some embodiments, hybrids consisting of amino acid sequences from two, three, four, or five antigens encoded by the S. pneumoniae Polypeptide sequences discussed herein are preferred.

[0271] Different hybrid polypeptides may be mixed together in a single formulation. Within such combinations, a sequence encoded by the S. pneumoniae Polypeptide sequences discussed herein may be present in more than one hybrid polypeptide and/or as a non-hybrid polypeptide. In some embodiments, however, that an antigen is present either as a hybrid or as a non-hybrid, but not as both.

[0272] Hybrid polypeptides can be represented by the formula NH₂-A-{-X-L-}ₙ-B—COOH, wherein: X is an amino acid sequence of a S. pneumoniae Polypeptide as described herein or a fragment thereof; L is an optional linker amino acid sequence; A is an optional N-terminal amino acid sequence; B is an optional C-terminal amino acid sequence; and n is 2, 3, 4, 5, 6, 7, 8, 9, 10, 11, 12, 13, 14 or 15.

[0273] If a —X— moiety has a leader peptide sequence in its wild-type form, this may be included or omitted in the hybrid protein. In some embodiments, the leader peptides will be deleted except for that of the —X— moiety located at the N-terminus of the hybrid protein i.e. the leader peptide of X₁ will be retained, but the leader peptides of X₂ . . . Xₙ will be omitted. This is equivalent to deleting all leader peptides and using the leader peptide of X₁ as moiety -A-.

[0274] For each n instances of {-X-L-}, linker amino acid sequence -L- may be present or absent. For instance, when n=2 the hybrid may be NH₂—X₁-L₁-X₂-L₂-COOH; NH₂—X₁—X₂—COOH; NH₂—Xᵢ-L₁-X₂—COOH; NH₂—X₁—X₂-L₂-COOH; etc. Linker amino acid sequence(s)-L-will typically be short (e.g. 20 or fewer amino acids i.e. 19, 18, 17, 16, 15, 14, 13, 12, 11, 10, 9, 8, 7, 6, 5, 4, 3, 2, 1). Examples comprise short peptide sequences that facilitate cloning, poly-glycine linkers (i.e. comprising Glyₙ where n=2, 3, 4, 5, 6, 7, 8, 9, 10 or more). Other suitable linker amino acid sequences will be apparent to those skilled in the art. A useful linker is GSGGGG, with the Gly-Ser dipeptide being formed from a BamHI restriction site, thus aiding cloning and manipulation, and the (Gly)₄ tetrapeptide being a typical poly-glycine linker.

[0275] In the hybrid polypeptide formula provided above, -A- is an optional N-terminal amino acid sequence. This will typically be short (e.g. 40 or fewer amino acids i.e. 39, 38, 37, 36, 35, 34, 33, 32, 31, 30, 29, 28, 27, 26, 25, 24, 23, 22, 21, 20, 19, 18, 17, 16, 15, 14, 13, 12, 11, 10, 9, 8, 7, 6, 5, 4, 3, 2, 1). Examples include leader sequences to direct protein trafficking, or short peptide sequences which facilitate cloning or purification. Other suitable N-terminal amino acid sequences will be apparent to those skilled in the art. If X₁ lacks its own N-terminus methionine, -A- is preferably an oligopeptide (e.g. with 1, 2, 3, 4, 5, 6, 7 or 8 amino acids) which provides a N-terminus methionine.

[0276] In the hybrid polypeptide formula provided above, —B— is an optional C-terminal amino acid sequence. This will typically be short (e.g. 40 or fewer amino acids i.e. 39, 38, 37, 36, 35, 34, 33, 32, 31, 30, 29, 28, 27, 26, 25, 24, 23, 22, 21, 20, 19, 18, 17, 16, 15, 14, 13, 12, 11, 10, 9, 8, 7, 6, 5, 4, 3, 2, 1). Examples include sequences to direct protein trafficking, short peptide sequences which facilitate cloning or purification, or sequences which enhance protein stability. Other suitable C-terminal amino acid sequences will be apparent to those skilled in the art.

[0277] In the hybrid polypeptide formula provided above, most preferably, n is 2 or 3.

### Nucleic Acids

[0278] This description provides nucleic acids encoding the S. pneumoniae Polypeptide sequences and/or the hybrid fusion polypeptides. This description also provides nucleic acids encoding S. pneumoniae Polypeptide antigen, and/or the hybrid fusion polypeptides described herein. Furthermore, the description provides nucleic acids which can hybridize to these nucleic acids, preferably under “high stringency” conditions (e.g. 65° C. in a 0.1×SSC, 0.5% SDS solution).

[0279] The polypeptides described herein can be prepared by various means (e.g. recombinant expression, purification from cell culture, chemical synthesis, etc.) and in various forms (e.g. native, fusions, non-glycosylated, lipidated, etc.). They are preferably prepared in substantially pure form (i.e. substantially free from other host cell proteins).

[0280] The nucleic acids described herein can be prepared in many ways (e.g. by chemical synthesis, from genomic or cDNA libraries, from the organism itself, etc.) and can take various forms (e.g. single stranded, double stranded, vectors, probes, etc.). They are preferably prepared in substantially pure form (i.e. substantially free from other host cell nucleic acids).

[0281] The terms “nucleic acid” and “nucleic acids,” as used herein, include DNA and RNA, and also their analogs, such as those containing modified backbones (e.g., phosphorothioates, etc.), and also peptide nucleic acids (PNA), etc. The compositions described herein include nucleic acids comprising sequences complementary to those described above (e.g., for antisense or probing purposes).

[0282] This description also discloses a process for producing a polypeptide, comprising the step of culturing a host cell transformed with nucleic acid as described herein under conditions which induce polypeptide expression.

[0283] This description also discloses a process for producing a polypeptide, comprising the step of synthesizing at least part of the polypeptide by chemical means.

[0284] This description also discloses a process for producing nucleic acid, comprising the step of amplifying nucleic acid using a primer-based amplification method (e.g. PCR).

[0285] This description also discloses a process for producing nucleic acid, comprising the step of synthesizing at least part of the nucleic acid by chemical means.

### Purification and Recombinant Expression

[0286] The S. pneumoniae Polypeptide sequences described herein may be isolated from native S. pneumoniae, or they may be recombinantly produced, for instance in a heterologous host. For example, the S. pneumoniae pilus II island (INV104B) antigens described herein may be isolated from S. pneumoniae containing the S. pneumoniae pilus II island (INV104B), or they may be recombinantly produced, for instance, in a heterologous host.

[0287] The heterologous host may be prokaryotic (e.g., a bacterium) or eukaryotic. It is preferably E. coli, but other suitable hosts include Bacillus subtilis, Vibrio cholerae, Salmonella typhi, Salmonella typhimurium, Neisseria lactamica, Neisseria cinerea, Mycobacteria (e.g. M. tuberculosis), S. gordonii, L. lactis, yeasts, etc.

[0288] Recombinant production of polypeptides may be facilitated by adding a tag protein to the S. pneumoniae Polypeptide sequences as described herein to be expressed as a fusion protein comprising the tag protein and the polypeptide. For example, recombinant production of polypeptides is facilitated by adding a tag protein to the S. pneumoniae pilus II island (INV104B) pilus antigen to be expressed as a fusion protein comprising the tag protein and the S. pneumoniae pilus II island (INV104B) pilus antigen. Such tag proteins can facilitate purification, detection and stability of the expressed protein. Tag proteins suitable for use with the compositions described herein include a polyarginine tag (Arg-tag), FLAG-tag, Strep-tag, c-myc-tag, S-tag, calmodulin-binding peptide, cellulose-binding domain, SBP-tag-chitin-binding domain, glutathione S-transferase-tag (GST), maltose-binding protein, transcription termination anti-termination factor (NusA), E. coli thioredoxin (TrxA) and protein disulfide isomerase I (DsbA). Preferred tag proteins include GST. A full discussion on the use of tag proteins can be found at Terpe et al., “Overview of tag protein fusions: from molecular and biochemical fundamentals to commercial systems,” Appl. Microbiol. Biotechnol. (2003) 60:523-533.

[0289] After purification, the tag proteins may optionally be removed from the expressed fusion protein, i.e., by specifically tailored enzymatic treatments known in the art. Commonly used proteases include enterokinase, tobacco etch virus (TEV), thrombin, and factor Xₐ.

### Immunogenic Compositions and Medicaments

[0290] The compositions described herein are preferably immunogenic compositions, and are more preferably vaccine compositions. In some embodiments, the pH of the composition is between 6 and 8, preferably about 7. The pH may be maintained by the use of a buffer. The composition may be sterile and/or pyrogen-free. The composition may be isotonic with respect to humans.

[0291] Vaccines as described herein may either be prophylactic (i.e. to prevent infection) or therapeutic (i.e. to treat infection), but will typically be prophylactic. Accordingly, methods are described for the therapeutic or prophylactic treatment of a S. pneumoniae infection in an animal susceptible to such S. pneumoniae infection comprising administering to said animal a therapeutic or prophylactic amount of the immunogenic composition described herein. For example, methods are described for the therapeutic or prophylactic treatment of a S. pneumoniae infection in an animal susceptible to streptococcal infection comprising administering to said animal a therapeutic or prophylactic amount of the immunogenic compositions described herein.

[0292] The compositions described herein can also be used as a medicament. In some embodiments, the medicament is preferably able to raise an immune response in a mammal (i.e. it is an immunogenic composition) and is, in some embodiments, a vaccine. The compositions described herein can also be used in the manufacture of a medicament for raising an immune response in a mammal. In some embodiments, the medicament is a vaccine.

[0293] The compositions described herein can also be use in kits containing one or more containers of the compositions. Such compositions can be in liquid form or can be lyophilized, as can individual antigens. Suitable containers for the compositions include, for example, bottles, vials, syringes, and test tubes. Containers can be formed from a variety of materials, including glass or plastic. A container may have a sterile access port (for example, the container may be an intravenous solution bag or a vial having a stopper pierceable by a hypodermic injection needle). Such compositions may comprise a first component comprising one or more S. pneumoniae Pili Polypeptides. Preferably, the S. pneumoniae Pili Polypeptides are in an oligomeric or hyperoligomeric form.

[0294] The kit can further contain a second container comprising a pharmaceutically-acceptable buffer, such as phosphate-buffered saline, Ringer's solution, or dextrose solution. It can also contain other materials useful to the end-user, including other buffers, diluents, filters, needles, and syringes. The kit can also contain a second or third container with another active agent, for example an antibiotic.

[0295] The kit can also contain a package insert containing written instructions for methods of inducing immunity against S. pneumoniae or for treating S. pneumoniae infections. The package insert can be an unapproved draft package insert or can be a package insert approved by the Food and Drug Administration (FDA) or other regulatory body.

[0296] A delivery device pre-filled with the immunogenic compositions described herein can also be used.

[0297] A method for inducing an immune response in a mammal can include the step of administering an effective amount of a composition as described herein. In some embodiments, the immune response is protective and preferably involves antibodies and/or cell-mediated immunity. This immune response will, in some embodiments, induce long lasting (e.g., neutralizing) antibodies and a cell mediated immunity that can quickly respond upon exposure to one or more S. pneumoniae antigens. In some embodiments, the method raise a booster response.

[0298] Methods of neutralizing S. pneumoniae infection in a mammal can include administering to the mammal an effective amount of the immunogenic compositions as described herein, a vaccine as described herein, or antibodies which recognize an immunogenic composition as described herein.

[0299] In some embodiments, the mammal is a human. Where the vaccine is for prophylactic use, the human can be a male or a female (either of child bearing age or a teenager). Alternatively, the human may be elderly (e.g., over the age of 50, 55, 60, 65, 70, 75, 80, or 85) and may have an underlying disease such as diabetes or cancer. In some embodiments, where the vaccine is for therapeutic use, the human can be a pregnant female or an elderly adult.

[0300] In some embodiments, the uses and methods described herein are for the prevention and/or treatment of a disease caused by S. pneumoniae. The compositions may also be effective against other streptococcal bacteria. The compositions may also be effective against other Gram positive bacteria.

[0301] Some methods of checking efficacy of therapeutic treatment involves monitoring S. pneumoniae bacterial infection after administration of a composition as described herein. A non-limiting means of checking efficacy of prophylactic treatment involves monitoring immune responses against the S. pneumoniae antigens in the compositions described herein after administration of the composition.

[0302] A non-limiting means of assessing the immunogenicity of the component proteins of the immunogenic compositions described herien is to express the proteins recombinantly and to screen patient sera or mucosal secretions by immunoblot. A positive reaction between the protein and the patient serum indicates that the patient has previously mounted an immune response to the protein in question—that is, the protein is an immunogen. This method may also be used to identify immunodominant proteins and/or epitopes.

[0303] Another means of checking efficacy of therapeutic treatment involves monitoring S. pneumoniae infection after administration of the compositions described herein. One way of checking efficacy of prophylactic treatment involves monitoring immune responses both systemically (such as monitoring the level of IgG1 and IgG2a production) and mucosally (such as monitoring the level of IgA production) against the S. pneumoniae antigens in the compositions described herein after administration of the composition. Typically, S. pneumoniae serum specific antibody responses are determined post-immunization, but pre-challenge, whereas mucosal S. pneumoniae specific antibody body responses are determined post-immunization and post-challenge.

[0304] The vaccine compositions described herein can, in some embodiments, be evaluated in in vitro and in vivo animal models prior to host, e.g., human, administration.

[0305] The efficacy of immunogenic compositions described herein can also be determined in vivo by challenging animal models of S. pneumoniae infection, e.g., guinea pigs or mice, with the immunogenic compositions. The immunogenic compositions may or may not be derived from the same serotypes as the challenge serotypes. In some embodiments, the immunogenic compositions are derivable from the same serotypes as the challenge serotypes. In some embodiments, the immunogenic composition and/or the challenge serotypes are derivable from the group of S. pneumoniae serotypes.

[0306] In vivo efficacy models include but are not limited to: (i) a murine infection model using human S. pneumoniae serotypes; (ii) a murine disease model which is a murine model using a mouse-adapted S. pneumoniae strain, such as those strains which are particularly virulent in mice and (iii) a primate model using human S. pneumoniae isolates.

[0307] The immune response may be one or both of a TH1 immune response and a TH2 response. The immune response may be an improved or an enhanced or an altered immune response. The immune response may be one or both of a systemic and a mucosal immune response. In some embodiments the immune response is an enhanced system and/or mucosal response. An enhanced systemic and/or mucosal immunity is reflected in an enhanced TH1 and/or TH2 immune response. In some embodiments, the enhanced immune response includes an increase in the production of IgG1 and/or IgG2a and/or IgA. In some embodiments, the mucosal immune response is a TH2 immune response. In some embodiments, the mucosal immune response includes an increase in the production of IgA.

[0308] Activated TH2 cells enhance antibody production and are therefore of value in responding to extracellular infections. Activated TH2 cells may secrete one or more of IL-4, IL-5, IL-6, and IL-10. A TH2 immune response may result in the production of IgG1, IgE, IgA and memory B cells for future protection.

[0309] A TH2 immune response may include one or more of an increase in one or more of the cytokines associated with a TH2 immune response (such as IL-4, IL-5, IL-6 and IL-10), or an increase in the production of IgG1, IgE, IgA and memory B cells. In some embodiments, the enhanced TH2 immune response will include an increase in IgG1 production.

[0310] A TH1 immune response may include one or more of an increase in CTLs, an increase in one or more of the cytokines associated with a TH1 immune response (such as IL-2, IFNγ, and TNFβ), an increase in activated macrophages, an increase in NK activity, or an increase in the production of IgG2a. In some embodiments, the enhanced TH1 immune response will include an increase in IgG2a production.

[0311] The immunogenic compositions described herein, in particular, immunogenic compositions comprising one or more S. pneumoniae Polypeptide antigen, may be used either alone or in combination with other antigens optionally with an immunoregulatory agent capable of eliciting a Th1 and/or Th2 response.

[0312] The compositions described herein will generally be administered directly to a patient. Certain routes may be favored for certain compositions, as resulting in the generation of a more effective immune response, in some embodiments, a CMI response, or as being less likely to induce side effects, or as being easier for administration. Direct delivery may be accomplished by parenteral injection (e.g. subcutaneously, intraperitoneally, intradermally, intravenously, intramuscularly, or to the interstitial space of a tissue), or by rectal, oral (e.g. tablet, spray), vaginal, topical, transdermal (see, e.g., WO 99/27961) or transcutaneous (see, e.g., WO 02/074244 and WO 02/064162), intranasal (see, e.g., WO03/028760), ocular, aural, pulmonary or other mucosal administration.

[0313] The compositions described herein may be used to elicit systemic and/or mucosal immunity.

[0314] In some embodiments, the immunogenic composition comprises one or more S. pneumoniae Polypeptide antigen(s) which elicits a neutralizing antibody response and one or more S. pneumoniae Polypeptide antigen(s) which elicits a cell mediated immune response. In this way, the neutralizing antibody response prevents or inhibits an initial S. pneumoniae infection while the cell-mediated immune response capable of eliciting an enhanced Th1 cellular response prevents further spreading of the S. pneumoniae infection. The immunogenic composition may include one or more S. pneumoniae Polypeptide antigens; one or more S. pneumoniae pilus or other S. pneumoniae antigens; and one or more non-pilus S. pneumoniae antigens, e.g., cytoplasmic antigens. In some embodiments, the immunogenic composition comprises one or more S. pneumoniae surface antigens or the like and one or other antigens, such as a cytoplasmic antigen capable of eliciting a Th1 cellular response.

[0315] Dosage treatment can be a single dose schedule or a multiple dose schedule. Multiple doses may be used in a primary immunization schedule and/or in a booster immunization schedule. In a multiple dose schedule the various doses may be given by the same or different routes e.g. a parenteral prime and mucosal boost, a mucosal prime and parenteral boost, etc.

[0316] The compositions described herein may be prepared in various forms. For example, the compositions may be prepared as injectables, either as liquid solutions or suspensions. Solid forms suitable for solution in, or suspension in, liquid vehicles prior to injection can also be prepared (e.g. a lyophilized composition). The composition may be prepared for topical administration e.g. as an ointment, cream or powder. The composition may be prepared for oral administration e.g. as a tablet or capsule, as a spray, or as a syrup (optionally flavored). The composition may be prepared for pulmonary administration e.g. as an inhaler, using a fine powder or a spray. The composition may be prepared as a suppository or pessary. The composition may be prepared for nasal, aural or ocular administration e.g. as drops. The composition may be in kit form, designed such that a combined composition is reconstituted just prior to administration to a patient. Such kits may comprise one or more antigens in liquid form and one or more lyophilized antigens.

[0317] Immunogenic compositions used as vaccines comprise an immunologically effective amount of antigen(s), as well as any other components, such as antibiotics, as needed. By ‘immunologically effective amount’, it is meant that the administration of that amount to an individual, either in a single dose or as part of a series, is effective for treatment or prevention, or increases a measurable immune response or prevents or reduces a clinical symptom. This amount varies depending upon the health and physical condition of the individual to be treated, age, the taxonomic group of individual to be treated (e.g. non-human primate, primate, etc.), the capacity of the individual's immune system to synthesize antibodies, the degree of protection desired, the formulation of the vaccine, the treating doctor's assessment of the medical situation, and other relevant factors. It is expected that the amount will fall in a relatively broad range that can be determined through routine trials.

### Further Components of the Composition

[0318] The compositions described herein can, in addition to the components mentioned above, comprise one or more ‘pharmaceutically acceptable carriers’, which include any carrier that does not itself induce the production of antibodies harmful to the individual receiving the composition. Suitable carriers are typically large, slowly metabolized macromolecules such as proteins, polysaccharides, polylactic acids, polyglycolic acids, polymeric amino acids, amino acid copolymers, and lipid aggregates (such as oil droplets or liposomes). Such carriers are well known to those of ordinary skill in the art. The vaccines may also contain diluents, such as water, saline, glycerol, etc. Additionally, auxiliary substances, such as wetting or emulsifying agents, pH buffering substances, and the like, may be present. A thorough discussion of pharmaceutically acceptable excipients is available in Gennaro (2000) Remington: The Science and Practice of Pharmacy. 20th ed., ISBN: 0683306472.

### Adjuvants

[0319] Vaccines as described herein may be administered in conjunction with other immunoregulatory agents. In some embodiments, compositions further comprise one or more adjuvants. Adjuvants for use with the vaccines described herein include, but are not limited to, one or more of the following set forth below:

### Mineral Containing Compositions

[0320] Mineral containing compositions suitable for use as adjuvants with the compositions disclosed herein include mineral salts, such as aluminum salts and calcium salts. Including mineral salts such as hydroxides (e.g. oxyhydroxides), phosphates (e.g. hydroxyphosphates, orthophosphates), sulfates, etc. (see, e.g., chapters 8 & 9 of Vaccine Design . . . (1995) eds. Powell & Newman. ISBN: 030644867X. Plenum.), or mixtures of different mineral compounds (e.g. a mixture of a phosphate and a hydroxide adjuvant, optionally with an excess of the phosphate), with the compounds taking any suitable form (e.g. gel, crystalline, amorphous, etc.), and with adsorption to the salt(s) being preferred. The mineral containing compositions may also be formulated as a particle of metal salt (WO 00/23105).

[0321] Aluminum salts may be included in vaccines described herein such that the dose of Al³⁺ is between 0.2 and 1.0 mg per dose.

### Oil-Emulsions

[0322] Oil-emulsion compositions suitable for use as adjuvants with the compositions described herein include squalene-water emulsions, such as MF59 (5% Squalene, 0.5% Tween 80, and 0.5% Span 85, formulated into submicron particles using a microfluidizer). See WO90/14837. See also, Podda, “The adjuvanted influenza vaccines with novel adjuvants: experience with the MF59-adjuvanted vaccine”, Vaccine (2001) 19: 2673-2680; Frey et al., “Comparison of the safety, tolerability, and immunogenicity of a MF59-adjuvanted influenza vaccine and a non-adjuvanted influenza vaccine in non-elderly adults”, Vaccine (2003) 21:4234-4237. MF59 is used as the adjuvant in the FLUAD™ influenza virus trivalent subunit vaccine.

[0323] In some embodiments adjuvants for use in the compositions are submicron oil-in-water emulsions. Preferred submicron oil-in-water emulsions for use herein are squalene/water emulsions optionally containing varying amounts of MTP-PE, such as a submicron oil-in-water emulsion containing 4-5% w/v squalene, 0.25-1.0% w/v Tween 80™ (polyoxyelthylenesorbitan monooleate), and/or 0.25-1.0% Span 85™ (sorbitan trioleate), and, optionally, N-acetylmuramyl-L-alanyl-D-isogluatminyl-L-alanine-2-(1′-2′-dipalmitoyl-sn-glycero-3-huydroxyphosphosphoryloxy)-ethylamine (MTP-PE), for example, the submicron oil-in-water emulsion known as “MF59” (International Publication No. WO 90/14837; U.S. Pat. Nos. 6,299,884 and 6,451,325, incorporated herein by reference in their entireties; and Ott et al., “MF59—Design and Evaluation of a Safe and Potent Adjuvant for Human Vaccines” in Vaccine Design: The Subunit and Adjuvant Approach (Powell, M. F. and Newman, M. J. eds.) Plenum Press, New York, 1995, pp. 277-296). MF59 contains 4-5% w/v Squalene (e.g. 4.3%), 0.25-0.5% w/v Tween 80™, and 0.5% w/v Span 85™ and optionally contains various amounts of MTP-PE, formulated into submicron particles using a microfluidizer such as Model 110Y microfluidizer (Microfluidics, Newton, Mass.). For example, MTP-PE may be present in an amount of about 0-500 μg/dose, more preferably 0-250 μg/dose and most preferably, 0-100 μg/dose. As used herein, the term “MF59-0” refers to the above submicron oil-in-water emulsion lacking MTP-PE, while the term MF59-MTP denotes a formulation that contains MTP-PE. For instance, “MF59-100” contains 100 μg MTP-PE per dose, and so on. MF69, another submicron oil-in-water emulsion for use herein, contains 4.3% w/v squalene, 0.25% w/v Tween 80™, and 0.75% w/v Span 85™ and optionally MTP-PE. Yet another submicron oil-in-water emulsion is MF75, also known as SAF, containing 10% squalene, 0.4% Tween 80™, 5% pluronic-blocked polymer L121, and thr-MDP, also microfluidized into a submicron emulsion. MF75-MTP denotes an MF75 formulation that includes MTP, such as from 100-400 μg MTP-PE per dose.

[0324] Submicron oil-in-water emulsions, methods of making the same and immunostimulating agents, such as muramyl peptides, for use in the compositions, are described in detail in International Publication No. WO 90/14837 and U.S. Pat. Nos. 6,299,884 and 6,451,325, incorporated herein by reference in their entireties.

[0325] Complete Freund's adjuvant (CFA) and incomplete Freund's adjuvant (IFA) may also be used as adjuvants with the compositions disclosed herein.

### Saponin Formulations

[0326] Saponin formulations, may also be used as adjuvants with the compositions disclosed herein. Saponins are a heterologous group of sterol glycosides and triterpenoid glycosides that are found in the bark, leaves, stems, roots and even flowers of a wide range of plant species. Saponin from the bark of the Quillaia saponaria Molina tree have been widely studied as adjuvants. Saponin can also be commercially obtained from Smilax ornata (sarsaprilla), Gypsophilla paniculata (brides veil), and Saponaria officianalis (soap root). Saponin adjuvant formulations include purified formulations, such as QS21, as well as lipid formulations, such as ISCOMs.

[0327] Saponin compositions have been purified using High Performance Thin Layer Chromatography (HP-TLC) and Reversed Phase High Performance Liquid Chromatography (RP-HPLC). Specific purified fractions using these techniques have been identified, including QS7, QS17, QS18, QS21, QH-A, QH-B and QH-C. Preferably, the saponin is QS21. A method of production of QS21 is disclosed in U.S. Pat. No. 5,057,540. Saponin formulations may also comprise a sterol, such as cholesterol (see WO96/33739).

[0328] Combinations of saponins and cholesterols can be used to form unique particles called Immunostimulating Complexs (ISCOMs). ISCOMs typically also include a phospholipid such as phosphatidylethanolamine or phosphatidylcholine. Any known saponin can be used in ISCOMs. Preferably, the ISCOM includes one or more of Quil A, QHA and QHC. ISCOMs are further described in EP0109942, WO 96/11711 and WO 96/33739. Optionally, the ISCOMS may be devoid of additional detergent. See WO 00/07621.

[0329] A review of the development of saponin based adjuvants can be found at Barr, et al., “ISCOMs and other saponin based adjuvants”, Advanced Drug Delivery Reviews (1998) 32:247-271. See also Sjolander, et al., “Uptake and adjuvant activity of orally delivered saponin and ISCOM vaccines”, Advanced Drug Delivery Reviews (1998) 32:321-338.

### Virosomes and Virus Like Particles (VLPs)

[0330] Virosomes and Virus Like Particles (VLPs) can also be used as adjuvants with the compositions disclosed herein. These structures generally contain one or more proteins from a virus optionally combined or formulated with a phospholipid. They are generally non-pathogenic and non-replicating, and generally do not contain any of the native viral genome. The viral proteins may be recombinantly produced or isolated from whole viruses. These viral proteins suitable for use in virosomes or VLPs include proteins derived from influenza virus (such as HA or NA), Hepatitis B virus (such as core or capsid proteins), Hepatitis E virus, measles virus, Sindbis virus, Rotavirus, Foot-and-Mouth Disease virus, Retrovirus, Norwalk virus, human Papilloma virus, HIV, RNA-phages, Q13-phage (such as coat proteins), GA-phage, fr-phage, AP205 phage, and Ty (such as retrotransposon Ty protein p1). VLPs are discussed further in WO 03/024480, WO 03/024481, and Niikura et al., “Chimeric Recombinant Hepatitis E Virus-Like Particles as an Oral Vaccine Vehicle Presenting Foreign Epitopes”, Virology (2002) 293:273-280; Lenz et al., “Papillomarivurs-Like Particles Induce Acute Activation of Dendritic Cells”, Journal of Immunology (2001) 5246-5355; Pinto, et al., “Cellular Immune Responses to Human Papillomavirus (HPV)-16 L1 Healthy Volunteers Immunized with Recombinant HPV-16 L1 Virus-Like Particles”, Journal of Infectious Diseases (2003) 188:327-338; and Gerber et al., “Human Papillomavirus Virus-Like Particles Are Efficient Oral Immunogens when Coadministered with Escherichia coli Heat-Labile Enterotoxin Mutant R192G or CpG”, Journal of Virology (2001) 75(10):4752-4760. Virosomes are discussed further in, for example, Gluck et al., “New Technology Platforms in the Development of Vaccines for the Future”, Vaccine (2002) 20:B10-B16. Immunopotentiating reconstituted influenza virosomes (IRIV) are used as the subunit antigen delivery system in the intranasal trivalent INFLEIXAL™ product {Mischler & Metcalfe (2002) Vaccine 20 Suppl 5:B17-23} and the INFLUVAC PLUS™ product.

### Bacterial or Microbial Derivatives

[0331] Adjuvants suitable for use with the compositions described herein include bacterial or microbial derivatives such as:

### (a) Non-Toxic Derivatives of Enterobacterial Lipopolysaccharide (LPS)

[0332] Such derivatives include Monophosphoryl lipid A (MPL) and 3-O-deacylated MPL (3dMPL). 3dMPL is a mixture of 3 De-O-acylated monophosphoryl lipid A with 4, 5 or 6 acylated chains. A preferred “small particle” form of 3 De-O-acylated monophosphoryl lipid A is disclosed in EP 0 689 454. Such “small particles” of 3dMPL are small enough to be sterile filtered through a 0.22 micron membrane (see EP 0 689 454). Other non-toxic LPS derivatives include monophosphoryl lipid A mimics, such as aminoalkyl glucosaminide phosphate derivatives e.g. RC-529. See Johnson et al. (1999) Bioorg Med Chem Lett 9:2273-2278.

### (b) Lipid A Derivatives

[0333] Lipid A derivatives include derivatives of lipid A from Escherichia coli such as OM-174. OM-174 is described for example in Meraldi et al., “OM-174, a New Adjuvant with a Potential for Human Use, Induces a Protective Response with Administered with the Synthetic C-Terminal Fragment 242-310 from the circumsporozoite protein of Plasmodium berghei”, Vaccine (2003) 21:2485-2491; and Pajak, et al., “The Adjuvant OM-174 induces both the migration and maturation of murine dendritic cells in vivo”, Vaccine (2003) 21:836-842.

### (c) Immunostimulatory Oligonucleotides

[0334] Immunostimulatory oligonucleotides suitable for use as adjuvants with the compositions described herein include nucleotide sequences containing a CpG motif (a sequence containing an unmethylated cytosine followed by guanosine and linked by a phosphate bond). Bacterial double stranded RNA or oligonucleotides containing palindromic or poly(dG) sequences have also been shown to be immunostimulatory.

[0335] The CpG's can include nucleotide modifications/analogs such as phosphorothioate modifications and can be double-stranded or single-stranded. Optionally, the guanosine may be replaced with an analog such as 2′-deoxy-7-deazaguanosine. See Kandimalla, et al., “Divergent synthetic nucleotide motif recognition pattern: design and development of potent immunomodulatory oligodeoxyribonucleotide agents with distinct cytokine induction profiles”, Nucleic Acids Research (2003) 31(9): 2393-2400; WO02/26757 and WO99/62923 for examples of possible analog substitutions. The adjuvant effect of CpG oligonucleotides is further discussed in Krieg, “CpG motifs: the active ingredient in bacterial extracts?”, Nature Medicine (2003) 9(7): 831-835; McCluskie, et al., “Parenteral and mucosal prime-boost immunization strategies in mice with hepatitis B surface antigen and CpG DNA”, FEMS Immunology and Medical Microbiology (2002) 32:179-185; WO98/40100; U.S. Pat. No. 6,207,646; U.S. Pat. No. 6,239,116 and U.S. Pat. No. 6,429,199.

[0336] The CpG sequence may be directed to TLR9, such as the motif GTCGTT (SEQ ID NO:22) or TTCGTT (SEQ ID NO:23). See Kandimalla, et al., “Toll-like receptor 9: modulation of recognition and cytokine induction by novel synthetic CpG DNAs,” Biochemical Society Transactions (2003) 31 (part 3): 654-658. The CpG sequence may be specific for inducing a Th1 immune response, such as a CpG-A ODN, or it may be more specific for inducing a B cell response, such a CpG-B ODN. CpG-A and CpG-B ODNs are discussed in Blackwell, et al., “CpG-A-Induced Monocyte IFN-gamma-Inducible Protein-10 Production is Regulated by Plasmacytoid Dendritic Cell Derived IFN-alpha”, J. Immunol. (2003) 170(8):4061-4068; Krieg, “From A to Z on CpG”, TRENDS in Immunology (2002) 23(2): 64-65 and WO01/95935. Preferably, the CpG is a CpG-A ODN.

[0337] In some embodiments, the CpG oligonucleotide is constructed so that the 5′ end is accessible for receptor recognition. Optionally, two CpG oligonucleotide sequences may be attached at their 3′ ends to form “immunomers”. See, e.g., Kandimalla, et al., “Secondary structures in CpG oligonucleotides affect immunostimulatory activity”, BBRC (2003) 306:948-953; Kandimalla, et al., “Toll-like receptor 9: modulation of recognition and cytokine induction by novel synthetic GpG DNAs”, Biochemical Society Transactions (2003) 31(part 3):664-658; Bhagat et al., “CpG penta- and hexadeoxyribonucleotides as potent immunomodulatory agents” BBRC (2003) 300:853-861 and WO 03/035836.

### (d) ADP-Ribosylating Toxins and Detoxified Derivatives Thereof.

[0338] Bacterial ADP-ribosylating toxins and detoxified derivatives thereof may be used as adjuvants with the compositions described herein. In some embodiments, the protein is derived from E. coli (i.e., E. coli heat labile enterotoxin “LT), cholera (“CT”), or pertussis (“PT”). The use of detoxified ADP-ribosylating toxins as mucosal adjuvants is described in WO95/17211 and as parenteral adjuvants in WO98/42375. In some embodiments, the adjuvant is a detoxified LT mutant such as LT-K63, LT-R72, and LTR192G. The use of ADP-ribosylating toxins and detoxified derivatives thereof, particularly LT-K₆₃ and LT-R72, as adjuvants can be found in the following references, each of which is specifically incorporated by reference herein in their entirety: Beignon, et al., “The LTR72 Mutant of Heat-Labile Enterotoxin of Escherichia coli Enhances the Ability of Peptide Antigens to Elicit CD4+ T Cells and Secrete Gamma Interferon after Coapplication onto Bare Skin,” Infection and Immunity (2002) 70(6):3012-3019; Pizza, et al., “Mucosal vaccines: non toxic derivatives of LT and CT as mucosal adjuvants,” Vaccine (2001) 19:2534-2541; Pizza, et al., “LTK63 and LTR72, two mucosal adjuvants ready for clinical trials,” Int. J. Med. Microbiol. (2000) 290(4-5):455-461; Scharton-Kersten et al., “Transcutaneous Immunization with Bacterial ADP-Ribosylating Exotoxins, Subunits and Unrelated Adjuvants,” Infection and Immunity (2000) 68(9):5306-5313; Ryan et al., “Mutants of Escherichia coli Heat-Labile Toxin Act as Effective Mucosal Adjuvants for Nasal Delivery of an Acellular Pertussis Vaccine: Differential Effects of the Nontoxic AB Complex and Enzyme Activity on Th1 and Th2 Cells,” Infection and Immunity (1999) 67(12):6270-6280; Partidos et al., “Heat-labile enterotoxin of Escherichia coli and its site-directed mutant LTK63 enhance the proliferative and cytotoxic T-cell responses to intranasally co-immunized synthetic peptides,” Immunol. Lett. (1999) 67(3):209-216; Peppoloni et al., “Mutants of the Escherichia coli heat-labile enterotoxin as safe and strong adjuvants for intranasal delivery of vaccines,” Vaccines (2003) 2(2):285-293; and Pine et al., (2002) “Intranasal immunization with influenza vaccine and a detoxified mutant of heat labile enterotoxin from Escherichia coli (LTK63),” J. Control Release (2002) 85(1-3):263-270. Numerical reference for amino acid substitutions is preferably based on the aligmnents of the A and B subunits of ADP-ribosylating toxins set forth in Domenighini et al., Mol. Microbiol. (1995) 15(6):1165-1167, specifically incorporated herein by reference in its entirety.

### Bioadhesives and Mucoadhesives

[0339] Bioadhesives and mucoadhesives may also be used as adjuvants with the compositions described herein. Suitable bioadhesives include esterified hyaluronic acid microspheres (Singh et al. (2001) J. Cont. Rele. 70:267-276) or mucoadhesives such as cross-linked derivatives of poly(acrylic acid), polyvinyl alcohol, polyvinyl pyrollidone, polysaccharides and carboxymethylcellulose. Chitosan and derivatives thereof may also be used as adjuvants with the compositions described herein. See, e.g., WO 99/27960.

### Microparticles

[0340] Microparticles may also be used as adjuvants with the compositions described herein. Microparticles (i.e. a particle of ˜100 nm to ˜150 μm in diameter, more preferably ˜200 nm to 30 μm in diameter, and most preferably ˜500 nm to ˜10 μm in diameter) formed from materials that are biodegradable and non-toxic (e.g. a poly(α-hydroxy acid), a polyhydroxybutyric acid, a polyorthoester, a polyanhydride, a polycaprolactone, etc.), with poly(lactide co glycolide) are preferred, optionally treated to have a negatively-charged surface (e.g. with SDS) or a positively-charged surface (e.g. with a cationic detergent, such as CTAB).

### Liposomes

[0341] Examples of liposome formulations suitable for use as adjuvants are described in U.S. Pat. No. 6,090,406, U.S. Pat. No. 5,916,588, and EP 0 626 169.

### Polyoxyethylene Ether and Polyoxyethylene Ester Formulations

[0342] Adjuvants suitable for use with the compositions described herein include polyoxyethylene ethers and polyoxyethylene esters. See WO99/52549. Such formulations further include polyoxyethylene sorbitan ester surfactants in combination with an octoxynol (WO01/21207) as well as polyoxyethylene alkyl ethers or ester surfactants in combination with at least one additional non-ionic surfactant such as an octoxynol (WO 01/21152).

[0343] In some embodiments polyoxyethylene ethers are selected from the following group: polyoxyethylene-9-lauryl ether (laureth 9), polyoxyethylene-9-steoryl ether, polyoxytheylene-8-steoryl ether, polyoxyethylene-4-lauryl ether, polyoxyethylene-35-lauryl ether, and polyoxyethylene-23-lauryl ether.

### Polyphosphazene (PCPP)

[0344] PCPP formulations are described, for example, in Andrianov et al., “Preparation of hydrogel microspheres by coacervation of aqueous polyphophazene solutions”, Biomaterials (1998) 19(1-3):109-115 and Payne et al., “Protein Release from Polyphosphazene Matrices”, Adv. Drug. Delivery Review (1998) 31(3):185-196.

### Muramyl Peptides

[0345] Examples of muramyl peptides suitable for use as adjuvants with the compositions described herein include N-acetyl-muramyl-L-threonyl-D-isoglutamine (thr-MDP), N-acetyl-normuramyl-1-alanyl-d-isoglutamine (nor-MDP), and N-acetylmuramyl-1-alanyl-d-isoglutaminyl-1-alanine-2-(1′-2′-dipalmitoyl-sn-glycero-3-hydroxyphosphoryloxy)-ethylamine MTP-PE).

### Imidazoquinolone Compounds.

[0346] Examples of imidazoquinolone compounds suitable for use adjuvants with the compositions described herein include Imiquamod and its homologues, described further in Stanley, “Imiquimod and the imidazoquinolones: mechanism of action and therapeutic potential,” Clin Exp Dermatol (2002) 27(7):571-577 and Jones, “Resiquimod 3M,” Curr Opin Investig Drugs (2003) 4(2):214-218.

[0347] The compositions described herein may also include combinations of the adjuvants identified above. For example, the following adjuvant compositions may be used with the compositions described herein:

[0348] (1) a saponin and an oil-in-water emulsion (WO 99/11241);

[0349] (2) a saponin (e.g., QS21)+a non-toxic LPS derivative (e.g. 3dMPL) (see WO 94/00153);

[0350] (3) a saponin (e.g., QS21)+a non-toxic LPS derivative (e.g. 3dMPL)+a cholesterol;

[0351] (4) a saponin (e.g. QS21)+3dMPL+IL-12 (optionally+a sterol) (WO 98/57659);

[0352] (5) combinations of 3dMPL with, for example, QS21 and/or oil-in-water emulsions (See European patent applications 0835318, 0735898 and 0761231);

[0353] (6) SAF, containing 10% Squalane, 0.4% Tween 80, 5% pluronic-block polymer L121, and thr-MDP, either microfluidized into a submicron emulsion or vortexed to generate a larger particle size emulsion;

[0354] (7) Ribi™ adjuvant system (RAS), (Ribi Immunochem) containing 2% Squalene, 0.2% Tween 80, and one or more bacterial cell wall components from the group consisting of monophosphorylipid A (MPL), trehalose dimycolate (TDM), and cell wall skeleton (CWS), preferably MPL+CWS (Detox™);

[0355] (8) one or more mineral salts (such as an aluminum salt)+a non-toxic derivative of LPS (such as 3dPML).

[0356] (9) one or more mineral salts (such as an aluminum salt)+an immunostimulatory oligonucleotide (such as a nucleotide sequence including a CpG motif). Combination No. (9) is a preferred adjuvant combination.

### Human Immunomodulators

[0357] Human immunomodulators suitable for use as adjuvants with the compositions described herein include cytokines, such as interleukins (e.g. IL-1, IL-2, IL-4, IL-5, IL-6, IL-7, IL-12, etc.), interferons (e.g. interferon-γ), macrophage colony stimulating factor, and tumor necrosis factor.

[0358] Aluminum salts and MF59 are preferred adjuvants for use with injectable influenza vaccines. Bacterial toxins and bioadhesives are preferred adjuvants for use with mucosally-delivered vaccines, such as nasal vaccines.

[0359] The immunogenic compositions described herein may be administered in combination with an antibiotic treatment regime. In some embodiments, the antibiotic is administered prior to administration of the antigen as described herein or the composition comprising the one or more of the antigens as described herein.

[0360] In some embodiments, the antibiotic is administered subsequent to the administration of the one or more antigens as described herein or the composition comprising the one or more antigens as described herein. Examples of antibiotics suitable for use in the treatment streptococcal infections include but are not limited to penicillin or a derivative thereof or clindamycin or the like.

[0361] Each of the patents, patent applications, accession numbers and publications described herein is hereby incorporated by reference in its entirety.

[0362] Various modifications of the invention, in addition to those described herein, will be apparent to those of skill in the art in view of the foregoing description. Such modifications are also intended to fall within the scope of the appended embodiments. The present invention is further demonstrated in the following examples that are for purposes of illustration and are not intended to limit the scope of the present invention.

### EXAMPLES

### Materials and Methods

[0363] S. pneumoniae Chromosomal DNA Extraction

[0364] The S. pneumoniae strains listed in Table 1 were grown in 200 mL liquid culture (THYE medium) until the OD600 reached between 0.25 to 0.5. Next, the samples were centrifuged at 6000 RPM for 15-20 minutes (some pellets were stored at this point at −20° C.). The pellets were then resuspended with 2.7 mL (for a 3 mL final volume) of 50 mM EDTA at pH 8.0 and transferred to a 15 mL Falcon™ tube (BD Biosciences; Bedford, Mass.). 0.55 mL of freshly prepared Lysozyme (12 mg/mL Sigma L-6876 in 50 mM EDTA pH 8.0 (Sigma-Aldrich Co.; St. Louis, Mo.)) and 50 μL of 5000 U/mL Mutanolysin (Sigma M-9901) in water were then sequentially added to the Falcon™ tube. These samples were incubated for one hour at 37° C.

[0365] After incubation, 3.6 mL of Nuclei Lysis Solution (Wizard® Genomic DNA Purification Kit (Promega Corp.; Madison, Wis.)) was added and the samples were mixed by inversion six-times. The samples were then incubated for 5 minutes at 80° C., then cooled to room temperature. Next 184 of RNase solution (Wizard® Genomic DNA Purification Kit) was added and the samples were mixed by inversion ten-times. The samples were then incubated for thirty minutes at 37° C.

[0366] Each sample was then divided into six 1.2 mL Eppendorf tubes. To each Eppendorf tube was added 0.2 mL of Protein Precipitation Solution (Wizard® Genomic DNA Purification Kit) and mixed by inversion ten-times. Immediately after the tenth inversion, the samples were centrifuged at room temperature in an Eppendorf centrifuge for three minutes at full speed. The supernatants from the Eppendorf tubes were then pooled into a 15 mL Falcon tube (about 8 mL was typically recovered). Next 0.6 vol. of isopropanol was added and the samples were mixed by inversion ten-times.

[0367] Precipitated DNA was recovered by inserting a Pasteur pipet that had been heat sealed and bent in a flame into the Falcon tube and hooking the pellet. The precipitated DNA pellet was then washed with Ethanol 70%. Finally, the precipitated DNA pellet was dissolved into 3 mL of TE (10 mM Tris HCl, 1 mM EDTA, pH 8.0).

### PCR Assays

[0368] The details of PCR are well known to those of skill in the art. (See Mark A. Valasek, M. A., & Repa, J. J. (2005) Advan. Physiol. Educ. 29, 151-159; Ausubel, F. M., Brent, R., Kingston, R. E., Moore, D. D., Seidman, J. G., Smith, J. A. & Struhl, K, Current Protocols in Molecular Biology, Hoboken, N.J.: Wiley, 2005.). The specific parameters used herein are as follows (50 μL final volume of amplification):

[0369] PCR Amplification of Genomic DNA

[0370] Reagents

5 μL Buffer (10× concentrated)
0.5 μL BSA (0.5 mg/ml)
1 μL dNTP (10 mM concentrated)
1.5 μL oligo @ 10 μmol/μL concentration (15 pmoles)
1.5 μL oligo @ 10 μmol/μL concentration (15 pmoles)
0.25 μL Taq polymerase (F. Hoffmann-La Roche Ltd; Basel, Switzerland)
50 ng genomic DNA
water to 50 μL

[0371] Cycle Parameters:

94° C. for 3 minutes (one cycle)
94° C. for 30 seconds, 52° C. for 30 seconds, 72° C. for 1 minute and 20 seconds (6 cycles)
94° C. for 30 seconds, 58° C. for 30 seconds, 72° C. for 1 minute and 20 seconds (30 cycles)
72° C. for 8 minutes (one cycle)

### PCR Amplification of Bacterial (Colony) DNA

[0372] Reagents

5 μL Buffer (10× concentrated)
0.5 μL BSA (0.5 mg/ml)
1 μL dNTP (10 mM concentrated)
1.5 μL oligo @ 10 μmol/μL concentration (15 pmoles)
1.5 μL oligo @ 10 μmol/μL concentration (15 pmoles)
0.25 μL Taq polymerase (F. Hoffmann-La Roche Ltd; Basel, Switzerland)
40.25 μL water
bacteria

[0373] Cycle Parameters

94° C. for 8 minutes (one cycle)
94° C. for 30 seconds, 52° C. for 30 seconds, 72° C. for 1 minute and 20 seconds (6 cycles)
94° C. for 30 seconds, 58° C. for 30 seconds, 72° C. for 1 minute and 20 seconds (30 cycles)
72° C. for 8 minutes (one cycle)

### DNA Probe Preparation and Hybridization

[0374] DNA samples were initially prepared (for steps 1 and 2) in parallel with separate containers for Cy3 and Cy5 labeling.

### (1) Pre-Anneal Primer to DNA

[0375] One gig genomic DNA, 2.6 μL random nonamers (GE Healthcare; Buckinghamshire, UK (formerly Amersham Pharmacia)), and 1.5 μL spikes (control DNAs) were combined and water was added to a final volume of 29.5 μL. The mixture was heated to 70° C. for five minutes, then cooled to room temperature for five minutes. Finally, the mixture was centrifuged briefly.

### (2) Reaction

[0376] 4 mL NEB2 buffer, 2 mL Nucleotide Mix (2 mM dATP, dGTP, dTTP and 1 mM dCTP) (individually obtained from GE Healthcare; Buckinghamshire, UK), and 2 mL dCTP Cy3 (or Cy5) (GE Healthcare; Buckinghamshire, UK (formerly Amersham Pharmacia) were added to the mixture from part (1). The combination was mixed gently and 2.5 mL DNA Polymerase I, Large (Klenow) Fragment (New England Biolabs, Inc.; Ipswich, Mass.) was added. The combination was gently mixed further then incubated at 37° C. for 2.5 hours. Finally, the mixture was centrifuged briefly.

[0377] The two labeling reaction solutions were then combined and unincorporated nucleotides were removed by running the solution through a Qiaquick PCR clean-up spin column (Qiagen, Inc.; Valencia, Calif.). The samples were eluted from the column with two 304 portions of EB buffer. Volume was reduced to 7.5 μL in a speed vacuum.

### (3) Pre-Hybridization

[0378] Aluminum slides were incubated for two hours at 42° C. in a 5×SSC, 50% formamide, 0.2% SDS solution. Then the slides were dipped in water three-times in one dish, and two more times in a separate dish. These prepared slides were blown dry with nitrogen.

### (4) Hybridization

[0379] The DNA samples from step 2 were heat denatured for two minutes at 95° C. Then the tube was spun quickly. A hybridization mix containing 1 vol. of version II buffer and 2 vol. 100% formamide (deionized) was prepared and 22.5 μL of this mix was added to each sample. Then the samples were mixed, spun briefly and incubated for one hour at 42° C. Finally, the slides prepared at step 3 were loaded with sample and incubated overnight at 42° C.

### (5) Post-Hybridization Washes

[0380] The slides prepared at step 4 were submerged in a 1×SSC/0.2% SDS solution at 55° C. (after cover slips were removed). The slides were then removed and placed in a cradle in a second tray containing the same solution. The slides were incubated in the second tray at room temperature for five minutes on an orbiting shaker. Next, the cradle and slides were transferred to a third tray containing a 0.1×SSC/0.2% SDS solution at 55° C. The cradle was dipped five times in the solution in the third tray and then incubated at room temperature for ten minutes. The slides were then transferred to a fourth tray containing the same solution as the third tray where the slides were again dipped five times and incubated at room temperature for five minutes. Next the cradle and slides were transferred to a fifth tray containing a 0.1×SSC solution at 55° C., where the cradle and slides were dipped five times. The cradle and slides were then transferred to a sixth tray containing the same solution as the fifth tray where the slides were again dipped five times. Finally, the cradle and slides were transferred to a seventh tray containing water, where the cradle and slides were dipped twice quickly and then dried in the cradle with nitrogen gas.

Microarrav Data Analysis Protocols for Comparative Genomic Hybridization of Genomic DNA of S. pneumoniae Strains

### Slide Acquisition

[0381] Two color images of hybridized slides were acquired with the microarray scanner ScanArray (PerkinElmer Life and Analytical Sciences; Shelton, Conn.) at 10 μm of resolution. Acquisition parameters (photomultiplier gain and laser power) were adjusted to maintain a comparable fluorescence level between the two fluorophores channels (measuring the intensity level of specific control spots and the mean intensity of all the spots).

### Image Analysis

[0382] Images were analyzed with the software Genepix 5.x (Molecular Devices Corp.; Sunnyvale, Calif.). Automatic and manually curated flagging procedures for no good quality spots were applied. From the acquired images, the Genepix software extracted the intensity levels and computed default statistical parameters for each feature spotted on the microarray slide.

### Data Management and Quality Check

[0383] Data management was performed by a local installation of BASE (BioArray Software Environment, rel 1.2.10, Lund University). The data analysis consisted of two phases:

[0384] (a) Background correction and normalization—In this procedure, the local background intensity was subtracted to each spot intensity. The intensities were then normalized to the mean or median intensity of all the spots. The background correction and the normalization procedure (plug-in rel. 1.4) were applied in BASE with the following parameters:
[0385] Experimental Normalization: Experimental Median
[0386] Experimental Background Background local
[0387] Threshold to correct (bkg stdev): 1
[0388] New values (bkg stdev): 1
[0389] Symmetric correction (CH1=CH2): Yes

[0390] (b) Data merging—Intensity values of repeated spots of a single slide or of repeated slides were merged computing the mean intensities of the separated two color channels. Spots that were flagged for low quality level or for background correction were filtered out. The algorithm also evaluated the probability of having different intensity levels between the averages of the two colors intensities (applying a T-test, plug-in rel. 1.7). The resulting dataset was stored in the BASE application and could be exported for other analyses.

### Clustering Analysis

[0391] The ratio of the two color intensity levels was transformed in log 2 scale.

[0392] The computed ratios were organized in a table dataset containing a column for each slide or group of merged slides (experiments), and a row for each spot or group merged spots (genes). The table was uploaded in the software TMeV (rel, 3.1, TIGR) for the clustering analysis.

[0393] Three main clustering algorithms were applied:

[0394] (a) Hierarchical clustering—This algorithm was applied to discover groups of genes showing similar presence/absence patterns among different experiments. In particular the algorithm was applied with the following settings of parameters:
[0395] Tree selection: Gene Tree and/or Sample Tree
[0396] Distance Metric Selection: Euclidean distance, Pearson uncentered
[0397] Linkage method selection: Average linkage clustering

[0398] A similarity tree (based on the unweighted pair group method with arithmetic mean algorithm, UPGMA) and a similarity matrix (based on the distance metric selected) were built to represent graphically and numerically the distances between experiments and between genes.

[0399] (b) Pavlidis template matching—This algorithm was applied to discover genes showing presence/absence patterns similar to a template pattern. Pavlidis template matching was applied to discover genes showing patterns correlated or anti-correlated to a reference gene among different experiments. The algorithm was applied using the threshold parameters Absolute R (selects patterns that are either correlated or anti-correlated with the template), a threshold p-value of 0.05, Pearson default distance metrics, and hierarchical clustering of the elements in the resulting matched and unmatched groups.

[0400] (c) Significance analysis of microarrays—This algorithm was applied to discover significant genes showing presence/absence patterns that able to divide the experiments in separated groups (defined a priori). The algorithm was applied to discover genes that were specific of a given group of experiments. The algorithm was applied with the following parameters:

[0401] Statistical test: Two-class unpaired

[0402] Number of permutations: 100

[0403] S0: Tusher et al. method

[0404] Q-values: No

[0405] Imputation engine: K-nearest neighbour imputer

[0406] Hierarchical clustering of the elements in the resulting matched and unmatched groups

### Example 1

### Determination of the Presence of the Pilus II Island (INV104B) in Genomic DNA

[0407] The determination of the presence of the pilus II island (INV104B) in the S. Pneumoniae strains listed in Table 1 was performed on purified genomic DNA or directly on bacteria (colony PCR). The four oligos used for amplification are listed in Table 2.

TABLE 2
PCR Oligos

| Designation | Direction | Sequence |
|---|---|---|
| 1008for | 5′ → 3′ | GCTGGATCGAGTTTGAAACCAGAA |
| | | (SEQ ID NO: 24) |
| 1009 rev | 3′ → 5′ | TAAGGATCACCAAAGTCCAAGGCA |
| | | (SEQ ID NO: 25) |
| Int-rev | 3′ → 5′ | TTTCAGTGTATGTTTTAGTGCTTCA |
| | | (SEQ ID NO: 26) |
| Int-for | 5′ → 3′ | ATGGCTTCAGGGGCTATGTTCGGTG |
| | | (SEQ ID NO: 27) |

[0408] Three diagnostic PCRs were performed for each strain listed in Table 1 with the following PCR Oligo combinations: 1008for-1009rev; 1008for-intrev; and intfor-1009rev. Clones positive for the pilus II island (INV104B) were successfully amplified by 1008for-intrev and intfor-1009rev. Strains negative for the pilus II island (INV104B) were successfully amplified by 1008for-1009rev.

[0409] The determination of the presence of the pilus island, i.e., the rlrA islet (as opposed to the pilus II island (INV104B)), in the S. Pneumoniae strains listed in Table 1 was performed. Similarly to the pilus II island (INV104B), specific primers were designed and used to amplify defined regions of the rlrA islet. Examples of methods for determining the presence of the rlrA islet are set forth in U.S. application Ser. No. 11/707,433, entitled “Purification of Bacterial Antigen,” filed Feb. 16, 2007; and U.S. Provisional Application Ser. No. 60/774,450, entitled “Purification of Bacterial Antigen,” filed on Feb. 17, 2006, the contents of which are incorporated herein by reference in their entirety.

[0410] Table 1 indicates that a great number of S. pneumoniae strains contain one or both pilus and pilus II island (INV104B).

### Example 2

### Sequences from 23F, INV200, and OXC141

[0411] 1. Sequence Download and Assembly

[0412] The preliminary sequences of four strains of S. pneumoniae were downloaded from the Sanger Web site (see worldwide web site “sanger.ac.uk/Projects/Microbes/”). The Sanger sequences are composed by a variable number of non-overlapping contigs. Details for the downloaded sequences are listed in Table 3:

TABLE 3
Downloaded Sequences

| Strain | Serotype | ST | # of Contigs | Total bp |
|---|---|---|---|---|
| 23F | 23F | 81 | 21 | 2225211 |
| INV104B | 1 | 227 | 68 | 1986609 |
| INV200 | 14 | 9 | 167 | 2022487 |
| OXC141 | 3 | 180 | 120 | 1962139 |

[0413] To identify the likely ordering of the contigs, the sequences were aligned against the TIGR4 complete sequence using MUMmer3.19, to form a single pseudo-molecule. To separate two subsequent contigs the following sequence was inserted:

(SEQ ID NO: 28)
NNNNNCATTCCATTCATTAATTAATTAATGAATGAATGNNNNN

SEQ ID NO:28 was designed to (i) generate a stop codon in all six reading frames so that no gene is predicted across junctions and (ii) provide a start site in all frames, pointing toward contigs to predict incomplete genes at their extremities. Contigs that did not align against the TIGR4 genome were put at the end of the pseudochromosome.

[0414] 2. Gene Prediction

[0415] The genes were predicted using the glimmer3.02 suite. The Hidden Markov Model was trained using the predicted genes of TIGR4 as a training set.

[0416] 3. Protein Set Comparison

[0417] All the proteins of each genome were compared against all the proteins of the other genomes using Fasta. A protein was considered to be conserved if its aminoacidic sequence could be aligned with a percent identity of at least 90% on at least 50% of its length.

[0418] The amino acid sequences of OXC141, INV200, and 23F that did not meet this criteria are set forth below. These sequences may provide polypeptides and/or proteins that can be used in compositions or methods of treatment for, diagnosis of, and immunization against S. pneumoniae infections.

[0419] 4. Start Codons

[0420] The N-terminal residues in the amino acid sequences listed herein are given as the amino acid encoded by the first codon in the corresponding nucleotide sequence. In those sequences in which the first codon is not ATG, it will be understood that the first codon will be translated as methionine when the codon is a start codon, but will be translated as the indicated non-Met amino acid when the sequence is at the C-terminus of a fusion partner. The listed sequences specifically disclose and encompass each of the amino acid sequences listed having a N-terminus methionine residue (e.g. a formyl methionine residue) in place of any indicated non-Met residue.

5. Sequences Identified from OXC141
>orf00007
(SEQ ID NO: 29)
MEMSFIAQDFDKLNIITVLESRTQAIIRNPMNTRLSSDTESSFNKIVRN
>orf00009
(SEQ ID NO: 30)
MELAETSIVKKNHQIPCIINQKIAQKLIKKTSMTDIDHQLSISTSTVIRKINDFHFEHDF
SRLPEIMS
>orf00013
(SEQ ID NO: 31)
LFKIGRVYYRQLQEDLLTCCNKYPKLFFFIIISLNSTQSGGVF
>orf00015
(SEQ ID NO: 32)
MKYNKTKYPNIYYYETAKGKRYYVRRSFFFRGKKREKSKSGFTTLPQARAALVELEQQIQ
EQELGINTNLTLDQYWDIYSEKRLSTGRWNDTSYYLNDNLYNNHIKAKFGSILLKNLDRN
EYELFIAEKLQNHTRYTVQTLNSSFMALLNDAVKNGNLLSNRLKGVFIGQSDIPAANKKV
TLKEFKTWIAKAEEIMPKQFYALTYLTIFGLRRGEVFGLRPMDITQNDSGRAILHLRDSR
SNQTLEGKGGLKTKDSERYVCLDDIGTDLIYYLIAEASKIKRKLGIIKEQHKDYITINEK
GGLINPNQLNRNFNLVNEATGLHVTPHMMRHFFTTQSIIAGVPLEQLSQALGHTKVYMTD
RYNQVEDELAEATTDLFLSHIR
>orf00016
(SEQ ID NO: 33)
MSYSYVALDVETANDFRGSVCSIGLVKFKDGNIVDTFYTLINPEEEFDDFNIFIHGITPE
DVLDSPTFPEVRKSIVDFIGLDIVVAHFAQFDMGALKDVYQKYELDFDNIEYICSYRLAK
VALPGQLNYKLKRLAKNLNIELDHHNALSDARASGLILEYLLSTNSFSDLTAFLKEYRYN
KTGLLGQYGFKRKKGYQYKENLIYQPTEEEKAAMNPDHYFYGLYFCFTGKLERMTRKEAN
KAAALVGGIPEKGVTKHTNILVVGEQDWRVVGTDGLSSKMKKAQTLLEKGQDIEIMTEND
FIRLLEE
>orf00017
(SEQ ID NO: 34)
MSLLSLHQCKVFLFYHDFISHGFKIVVGHEFEVIKLCGVIQAF
>orf00019
(SEQ ID NO: 35)
MKNKKPNAERLQEIADYFNVSTDYLLGRTDNPAIAGDSKEYTWQGKTLNVEEMASNVMMF
GGRELTDEKKKIIQSIIEGYLKEAGD
>orf00020
(SEQ ID NO: 36)
MSKLTKEDVLQVSQEIINDAIPVIKDMLDEVFKEYPIDMEIRKAILNSVLVAHKLSTETT
VSLLTELVNAQEN
>orf00021
(SEQ ID NO: 37)
MSKELKIIKANIKTRLIELDMTQAELAKQVSVASSVISELLKYGEGSESVREKVADVLGI
ENPWENS
>orf00022
(SEQ ID NO: 38)
MDYQILIQPAISVILAIISGLWSYIASKANNKAEIEKQAKEHSHIVEKLEKEFHYQIDTL
KQQHTLELEKVKQAHELRLQELEKVSQIDTETDKAMKMNDLIYKTFTGEVDLDKALKLAD
KANNHKQKLNKKFIQKTSKKS
>orf00023
(SEQ ID NO: 39)
MNEIFNFHGQEVRTLTIDDEPWFVGKDVADILGYSKARNAITLHVDEEDALKQGIPTSGG
TQDMLIINESGLYSLILSSKLPQAKEFKRWVTSEVLPAIRKQGGFIREDLDEDAFIALFT
GQKKLREQQATMLEDIDYLKSEQPIHPSYAQSLLKKRKARVVACLGGIDSPAYADKVFAQ
SVFRQAEIDFKDHFNISRYDLLPKKHADAALAYWMTWEPSTNTKMKIMKLNSFDDV
>orf00025
(SEQ ID NO: 40)
MFEPPILDQLMGVGALLLGFAGACRHIKLQEQRKEEERREEQEFASMIIQGYNHAYERGR
EAERQEIRKNIRRPFKGFTYDNEPPQGLRPEPLALPEPKQSAIRLL
>orf00026
(SEQ ID NO: 41)
MEELIESLDNLIMIVKELEGRESTSRHFITIWENDYKNLLLVKEYLTDYEKLAKDYRYVT
LKNKLLKIEKMELEGRHIYEDMRMKYRANRRKWGARYV
>orf00027
(SEQ ID NO: 42)
VLGMSEIKWIKITTDIFDDEKICLIDALPDPDAILVIWFKILTLAGKHNSNGLLMMTDKV
HYTDEMLATIFRRPLNTVRMAIGVFEQFGMIEIIDGIISLPNWEKHQNVDGMEKIKEQTR
NRVAKYRKKQKNLALGNVTGNVTVTDGNALEEDKDKNKNRLDKDKNKKRITTTSSGSEEN
ILELFQSEFRRLLSGFEIEEINHLLNENDVDLVKEALKTAINSGKPNIKYIGGILRNWQM
NNVTTVEQVRQSEKKNKDKKEEQEAKDEWGY
>orf00029
(SEQ ID NO: 43)
MRRSASMVDNVFEEIALSYRRNTEQQEEFCEKHNIPLIKILRTESVVCRMCESERIHEEN
QERVNELANAENERERKYYLEKFSLYDEVLKNATLDNFETPTEKEAEKLAFAKRICREWS
EGARNNIVLQGEAGTGKSHLAFAMVKVLSEYTKEIAIFINVTDLLMKIKADFSQEEFLVN
KIASAKFLVLDDLGMEKDSEWSFTILYNILNKRSNTIITTNLISADIQKRYGRPFMSRLM
KGVDKDHLMVFNDLTNKRKQYF
>orf00030
(SEQ ID NO: 44)
MLELYFVYNGHCKFFLGRFDNVDDLIEQMEDHQWAFSAITHPRFQKHIGQRTTRFDYGSK
DCYYLATFSGGE
>orf00031
(SEQ ID NO: 45)
MVGVTYQEIHLFVEFLKEQYGQGRPDYIEALNDLDGLVEVSYREAIERFLEDEVR
>orf00032
(SEQ ID NO: 46)
MMEELKKKVNAVYNWTVEDGKPQPPQQDLPQAVKDRVDYFWEMAEDGMTFMGAMECIFAD
EKPTDYELGATKGWLPKSKEFDDWIGYSPSMAQVVIAVYLIYGGN
>orf00033
(SEQ ID NO: 47)
MEETKMNKQELIKKLEERRTIIGNFQGYAVSYFWIYWIVEK
>orf00035
(SEQ ID NO: 48)
MEFVSPIKDNDDIQAMKDYLREWNEMYYMLFITGLNTGLRVGDILTLKVKDVQGWHIKLR
ERKTGKQITRRMTKELKKEMRRYVEGKPFHHFLFKSRQGQNKAITRERAYQIIHEAAEEL
GIDNVGTHTMRKTFGYKYYNKTKDVGTLQKMFNHSSPAITLRYIGIEQAELDDALRNFVI
>orf00036
(SEQ ID NO: 49)
MYNKPVRPSLKSKKWEKFRDRIMRKHDYLCQESLRYGISVQAEMVHHIFPVSEYPELEFV
EWNCLPLTNKKHNTFHDRVNDRVINQGLYWQKKRKKEFLNFFKNEK
>orf00037
(SEQ ID NO: 50)
LAKPITAKSIKSKVVKQMKDLGTYRKEFEMIIDIFAGMLYQYQKLAQDYANLGYPVTDTY
VNKAGAENERKVPILTAMEILRKDILSYSNQLMMNPKSLGEVVEQEGDSVLTEVLKFKNE
IKKKRVSGNG
>orf00040
(SEQ ID NO: 51)
MGNLDKAKEYAQHVLTHREEHCEENILAAERFFRDLENPAFEMDEDMVDFVIHFIENVIV
HQQGDDMFAVSIRNKPLLLQPWQHFVVVNLFGFYYKGTNERRFKEALIMLARKNGKTSFT
AAIALAYQILDTDSGSKCYIVANSVKQAMEAFGFLRFNVERWNDKNIRIKDNNQEHSITA
NFGDEGSFFIQALANDESRLDSLNGNVIILDEAHTMRNSKKHGLMKKTMSAYRNSMLFVI
STAGDIPTGFLANRLKYCQKVLKQLVTDDSFFIFICKANQSADGDVVNYLDENILKMANP
SWGVTVSLKALKEEAEQAMNDPQTRNEFFNKTLNIFTNSMNAYFNPDEFIASDSCYDWSL
EELARLPIRWYGGADLSRLHDLTAAALYGVYHDGEKDVDICITHAFFPRINAQKKANDDG
IPLFGWQSDGWLTMSNTPTVLYDDIVKWFIKMREKGFKIAAVGMDRKFGREFLTKMKQAR
FKMIDQPQLFYLKSEGFRRIEFKVKNKEFYYLHSDAYEYCVSNVRAIEKVDDAVQYEKLD
GDGGTARIDLFDASVFACIQALANLGKGGDVMRFFD
>orf00043
(SEQ ID NO: 52)
MNEIVLSEHEINLLINKGRVKVILNGEVVTIRQRHMKNLMAETVKWEKQVIDVSQNIVRN
KHFDSLFQNTFR
>orf00045
(SEQ ID NO: 53)
MGIFEKFWKRNKPSKPINMLSHSDLGLSNLMDSYVPLARNPDVVTAVNKIADLVSNMTIH
LMENTDKGDIRIRDGLARKIDINPCKHMTRKSWIFKIVRDLLLYGDGNSVLHVEYEPVTD
YISNLRPFPMREVSFQTDKDSYVISFRGEEYSPDEVVHFVINPDPDILYIGTGFRVTLTD
VVQSLNMATKTKKSFMNGKNIPSLIVKVDSSSAELDSEQGRERIAEKYLSTSRVGAPWIV
PEALLDIQQVKPLSLTDIALNESVELDKRTVAGLLGVPAFILGVGEFNKTEYNNFVNTTV
MSIATTITQTLTRDLLLSSNRYFKLNPRSLFSYNITELSAVAQQMANSAAMRRNEWRDWL
GMAPDPEMEELIVLENFLPQEKLGDQNKLKGGEEENAKAK
>orf00047
(SEQ ID NO: 54)
MQKRNSYRATQFQTREEESGDLVLSGYFIKFDEETELWRGYHEVIKRAGVEKAVTDADIR
ALFNHDDSLVLGRTGNGTLTLGVDDVGLFGDIIINKDDPQAVGAYARVKRGDVIGCSFGF
IPVKIETEEREDGSYLDTVLELEIFEVSPCTFPAYPQTEIAARQKDFESQKRANREALDK
RKKEIKEKFKL
>orf00048
(SEQ ID NO: 55)
MNKALIFGARMRAKATKVVELEETIEELNKRSVVELEKLDRAKNDEEVLAVEKTVDGLQR
EIEEKEAEKVQLENEIDELDKQIKEQNRKAPTPGKMEERGGKTLGQREAFNHYLRTKEAR
ADGFKSAEGEAIIPVELMTPKEAKQDKTDLTSLVNIVNVKNASGKWSVVKLTDQAMNTVE
ELEENPELAKPTFTKVNYEIKTRRGHLPVSQEFIDDADYDVMGLVAKQTKNQERITKNKE
IAKVLKTATSKSAAGLDGLKDILNVELKTYYNATIVCTQSMFAALDKIKDKDGRYMLQTD
ITSPTGYKFAGRVIVVYPDDIIGESKGDLKAFIGDVGEFATLFDRAQTTVKWQDDKIYGQ
YLATANRFDVVKVDGDAGFYVTYTDAVL
>orf00050
(SEQ ID NO: 56)
LMNVEDKDMSKDDTLTTEVEKEETKVVDGKPEEGDEE
>orf00051
(SEQ ID NO: 57)
MDNVQLLELLKLKLGIATKLRDKPLEKIIEAVKTELEDNLGVLLDLDSSEDQMFVVDFAA
FRYEGGVDMPRHLQWRLHNLQIASKKKVKNVES
>orf00052
(SEQ ID NO: 58)
MWNHEIKLISKKITGKDKLLQPISEDVEVTLLCRKKNVTRSEFYQANQAGLKPSLVVEIR
NFEYENQEFAKFEGKQYRILKTYPIDSEILELTLTEVLK
>orf00054
(SEQ ID NO: 59)
MSNDLADLIAKELAAYSDEVTEEVDKIAEQVTDETVDELKETSPKRYGKYRRSWKKKKLA
NGSFVVFNAVASLTHILENGHLSRNGGRVAGIVHIKPAEEKAIQNFEKRIKEIGK
>orf00055
(SEQ ID NO: 60)
MKLSDFAAILEQANLPVTYRAFKIGNAPDLPYLVYYESSPVINSADNTVNHQIKSVTVEL
AFESKDEDLEERLEELWANHKLFFEVQEETFIETERLYVKSYTVYLY
>orf00057
(SEQ ID NO: 61)
MTQENKVTFGLENVHIAPIKTLAADGVITYGDVFRFPGAMELILDTKGETTPIKADNKNY
HFMNSNEGYEGKLKIPHIIDEFATKILGEIKDPQTGVMTEKADASLTEFAIMFQFEGDKN
KTRYVMYYCFASRPSLGSKTKNGTSTNERELSFKASPRPLDTVVKRSITSADDKDAYDNW
FKKVYEPTAVAA
>orf00058
(SEQ ID NO: 62)
MRKIVLVGDQEYELGTNGYTPIAYKQQFGKDYFQDLFSMLKNQSFMNELNKLETDKELTA
TNIDISMLSDFDMTFFNRLFWTFAKSANPQIKPYEQFFMEMEIFPIQEVGPVLMEMLNAS
MTTKKHQMNQNQLAKKSSQ
>orf00060
(SEQ ID NO: 63)
MAGNIKGIKIEIDGDTQPLQKALKAINKESVNTTNELKQIDKALKFDTGNVILLTQKQEV
LQKQIGITRDKLETLRQAQSKVDEEFKKGNIGSEQYRAFQREVEVTQNVLKGYEGKLASL
TQALEGNGDAAKNNQAQLKELQNEQKLLASESEKVVSSFKLQESQMGANASEADKLALAE
KKIGAQSEIVTRQIENLEKQLSLTKEQYGENSAEANKMEAELNQAKTAYANLNQELGKLG
STAKSNQTQLKELQNEQSQLASEMSKVTSSFKLQESALGSNASEAERNALAQKKIGAQSE
IVSKQISNLEQQLEITKKEFGENSTQANKMESELNQAKTAFNHLNDEMKGTKSAADSTQE
SLSEISRNLRAELLQQFSEKLSAISEKLVEVGKEALEAAAQMQASNAQFTTVFGDMETQA
REALNAIGQEMDIVPERLQGSFTQMASFAKTSGLDTAEALDLTSRATRAAADGAAFYDKS
IESVTESLQSFLKGNFANDAALGISATETTRNAAANKLYGKSFKDLSEAQKQLTLLQMVE
DGNKLSGALGQAARESDGLENVMGNLKQAGTNALSAIGQPLLEMMIPVFQTLATIVKGVA
ELFSSLPAPVKDFVVILGTVVTAVGVIAPIFLSLQALAEFLKISIGEMIIAALPIIGTAI
AIAAAVAAIVAIVKYLWETNEGFRDAVTTVWNAILEVINAVVSEISNFVMSIFGTVVTWW
TENQELIRTSAETVWNAIYTVISTILDILGPLLQAGWDNIQLIITTTWEIIKIVVETAIN
VVLGVIQAVMQIITGDWSGAWETIKGVFSTVWQAIQSIVQTIFSAIQSYISNILNGISGT
VSNIWNSIKDTVSNVLNAISSTVSSVWEGIKSTISSAINGARDAVSSAIEAIKGLFNFNI
SWPHIPLPHFYVSGSANPLDWLSQGVPSIGIEWYAKGGIMTKPTIFGMNGNNIMVGGEAG
NEAVLPLNDKTLGAIGRGIAQTMGGTSPTINITITGNTVREEADISRIADEVAQRIADEL
QRKTQLRGGFT
>orf00064
(SEQ ID NO: 64)
MIKHNELVIDGVRTSSFPFKVIVHDSPSIALGESKTALLEHGGISGAIVQTNKHRELVKK
TYTIYLVKPTEEQMNQFMSLFIREKFWLESERVKTTRLWCYKVNVSDLEEVQPGLYMTKA
TFTCHPTKHFKVTDTQRLTRSGTLNVQGSALAFPKITIVGQSASETSFTIAGQVIRLERL
TESLVMVNNPDNPSFKTTTGKPVKWSGDFITVDPAKVKNIGVVLGPGIQSLEIETVWGWA
>orf00068
(SEQ ID NO: 65)
LLYLLNEDVRTVRWNGESLHEATSAIVKETMNGDFTLTVKYPISDSGIYQLIQEDMLIKA
PTPVLGAQLFRIKKPVEHNDHLEITAYHISDDVMQRSITQMSVTSQSCGMALSRMVQNTK
TALGDFSFNSDIQDRRTFNTTETETLYSVLLDGKHSIVGTWEGELVRDNFAMTVKKSRGE
NRGVVITTHKNLKDYQRTKNSQNVVTRIHAKSTFKPEGAEKETTIRVTVDSPLINSYPYI
NEKEYENNNAKTVEELQKWAQSKFSNEGIDKVSDAIKIEAYELDGQVVHMGDTVNLKSWK
HNVDAFKKAIAYEFDALKEEYISLTFDDKAGIGGSRASGGLSSAADAILGVTESAQEIAL
EKALQNADLDFDHKAGLLRQEISDDIELAKARAEEVKRELSDTINQRFNSFDNGPLKETK
RKAEEALRNAGASSSLAQESKRIGLDSVARLEAFKSQTTSAQTALSGDLDALKRTIANDI
RPKQAQAEAEIAKQVEALSRTKNELAGASTLLAQEAKRIELDSVARLEAFKSQTTSAQTA
LSGDLDALKRTIANDIRPKQAQAEAEIAKQVEALSRTKNELAGASTLLAQEAKRIELDSV
ARLEAFKSQTTSAQTALSGDLDALKRTIVNDIRPKQAQAEAEIAKQVEALSRTKNELAGV
KSAQATYKETTTRRLSELTNLANGKASKSELTQTAEELSSKIASVQASGRNLFLNSLFKQ
DIPKTGIWTTSTYTATIDSESKYLGHKALKIIGLNPSGRDGGNPKVTYPALGQFGKVIPG
STTNQDVTISFYAKANKNGIMLRSRLGNIGYKTGNVTLSTEIKRYAVHIPKGWTNESKRT
TNEWLFNFNQEGTVWIWMPKFEISDVDTSYSEAPEDIEGQISTVESTFKQRANSLEAGVS
RLTEGLRTKADISSLNVTAENIRQSVKSLETDTQNKLNQKLSQAEFEVRAGSIRQEILNA
TKDKADKTLVVSEAGKLREEFSKMKVGGRNLWIKSKTVGAVIEKLPENHVTGQKECYRLE
NNSTLTFNLEPDFSSRLYQKVTFSAWIKYENVVQGRNFWNVFNCFKHYLFRKNSETGVQS
GPDYDTLGRYKGSADWKYITFTYDYSEKTNFDQLKTLLRFNLEGATSGTAWVTGIKVEIG
SVATDWSPAPEDADGLITEAKATFERTAQGLRTDLSAITEGLRTKVDISALNVTAENIRQ
SVKSLETDTQNKLNQKLSQAEFEVRAGSIRQEILNATKDKADKTLVVSEAGKLREEFSKM
KVGGRNLWIKSKTVGAVIEKLPENHVTGQKECYRLENNSTLTFNLEPDFSSRLYQKVTFS
AWIKYENVVQGRNFWNVFNCFKHYLFRKNSETGVQSGPDYDTLGRYEGSADWKYITFTYD
YSEKTNFDQLKTSLRFNLEGATSGTAWVTGIKVEIGSVATDWSPAPEDADGLITEAKATF
ERTAQGLRTDLSAIQEYVNKDGQRQEALQRYTREESTRQATAVRELVNRDFVGKATYQED
VKGINQRIEAVKTSANKDIASQIASYRQSVDGKFTDISSQITTYKQDVGGQISGLSNRLT
SSEQGTTTQISNLSNRINSNKQGTDNQISNLKTQVATNKDNAERQMGRISDQVSANKANA
DSQFANVTNQLARKVETTDFQRVKETSKLYERILGNTENGIADKVARMALTNQLFQVEVA
KNASNGQNLLKGTKDFSGGWKNKGANWKKHAEKYKGVDVLFKNNSWNGVGQEIDAKIGEV
YTFSLWMKSDWKNDTVNFYVNRNGSVEKGWGVPSETSVAITSEWKRYSFAFKITVDGFIF
PRVERLNQNTNLYIAGLKLEKGSYATPYTEAPEDTDEAIRSVQSQLTGSWAVQNINSAGD
IISGINLGANGHNRFVGKLTHITGETLIDRAVIKSAMVDKLKTANFEAGSVTTTILDAEA
VTADKVRFDAAFIRKMTANDAFIDQLTSKRIFSTKVESVISSSTFLEAYQGRIGGFTIGR
FAQGRGRWISGINQFSVGMGNGEGGSYNGENTAFWANWGHSWNSPGPNAWYVTTSGNMYC
RNGADFHGKVDFSNSSRANFYGNTTFSRSPVFSNGIELGSKDVLGDGWNPKGGRNAVVWW
NQVGSGSVKYWMEQKSDRRLKENITDTAVKALDKINRLRMVAFDFIENKKHEEIGLIAQE
AETIVPRIVSRDPENPDGYLHIDYTALVPYLIKAIQELNQKIEKMEKTIA
>orf00069
(SEQ ID NO: 66)
MNTEQLNQALQMTIREMSTTSTNSMITSNILSIQLNEQREENQRLQARVDELEALLDEQT
KPADKGE
>orf00071
(SEQ ID NO: 67)
MAETIQNTDNLLDLTKITEPFDLASALRYMKENGEFIRCKNVSDDFYMYRDVQKRPVIVN
GRRQFKDIETVWAFNQWGGTITTINVAVLLNHEFYIMKFDAEGNPDWTNPTVEPKE
>orf00072
(SEQ ID NO: 68)
MQIEFFNFLRSVVQTEDGLVLYALALIVSMEIIDFVTGH
>orf00073
(SEQ ID NO: 69)
MILIPASVLLPEKTGFVFLHSIYLGYIAFTFQSLIENYRKLKGNVTLFQPIVKVFQRLLE
KDDDTKKGE
>orf00074
(SEQ ID NO: 70)
MQQITEIITNGAISILVILAGIAVKAVKEYLVKKGGEKTIKIVEILAKNAVNAVEQVAAE
TGYKGDEKLAQARAKVRAELTKYNISMTDKDLDTFVESAVKQMNDAWKGR
>orf00075
(SEQ ID NO: 71)
MAFNQFNRCVTLSIPTAPNIPTSVVHRTYLHDTAVSDNM
>orf00079
(SEQ ID NO: 72)
MKNREEEWQGIIAKNAILLIIAPFYFLIIVKNGVLLKIKTVTEITAF
>orf00085
(SEQ ID NO: 73)
VEEVEVAEVKNARVSLTGEKTKPMKLAEVTSINVNRTKTEMEEFTRVLGGGVVPGSLVLI
GGDPGIGKSTLLLQVSTQLSQVGTVLYVSGEESAQQIKLRAERLGDIDSEFYLYAETNMQ
SVRAEVERIQPDFLIIDSIQTIMSPEISGVQGSVSQVREVTAELMQLAKTNNIAIFIVGH
VTKEGTLAGPRMLEHMVDTVLYFEGERHHTFRILRAVKNRFGSTNEIGIFEMQSGGLVEV
LNPSQVFLEERLDGATGSSIVVTMEGTRPILAEVQALVTPTMFGNAKRTTTGLDFNRASL
IMAVLEKRAGLLLQNQDAYLKSAGGVKLDEPAIDLAVAVAIASIYKDKPTNPQECFVGEL
GLIGEIRRVNRIEQRINEAAKLGFTKIYVPKNSLTGITLPKEIQVIGVTTIQEVLKKVFA
>orf00088
(SEQ ID NO: 74)
MGVSIFLALFYMIPALYFLFHIGKKWELPKKVLILSLLGAICSFTSLLLFGIYNHRRKSS
KV
>orf00094
(SEQ ID NO: 75)
VFVALVSITFSLINFFKILINLTAQVSPQVIDEKILMMDLNLNNYLSTVIQLRQDVYTGI
KILH
>orf00095
(SEQ ID NO: 76)
VNIASLQNGHIFCWQVQHIANKLTSDFWIAEYFLSNQIISWADARMSENPPIPPSIVS
>orf00103
(SEQ ID NO: 77)
MKIKEQTRKLAAGCSKHCFKVVNGTDEVSSKHCFEVVDGTDEVSSKHCFEVVDRTDEVSN
HIYGKATLTWFEEIFEEYKSLHNKTHITKVV
>orf00109
(SEQ ID NO: 78)
MNDDDSRCIHIERDGKTIEFGYLNISSTDRNTSHADGLVGIFNSNFSGVRVRGIAVFLNG
PDNLDTTLVGNFQTIWNFRIICIHSQNTCNKG
>orf00110
(SEQ ID NO: 79)
LEFNFCRSIIKNGRDNLPNTNSTSGMATRWANHNWSDDIKDRLKTK
>orf00114
(SEQ ID NO: 80)
MRYDFGKVYKEIRESKGLTQEEVCGNVISRTSLSKIESGKATPKYENMEFLLRQINMSF
>orf00116
(SEQ ID NO: 81)
MNYNLKYLLSGIFVLVFIGFLVWMRYFNQRKEEEHSDVSFEARLDSEVKTLYKQLGLGEE
PHYFLAYRYLHPWFDLAILPPTVEIFLTKIALVMVTPDELLIRNLGNGLTFTSEHHRDLR
QGLIRIPKSEMKEFEIRNWKKFFVFGDFLTIKTSQHSYYLQVRDDGLQKGSLSTKHFSDL
KSQDFLGLLTDKRTF
>orf00124
(SEQ ID NO: 82)
LSLLDLRGSLCLRIYLHEPLITTVSQDFTSLSDISHF
>orf00125
(SEQ ID NO: 83)
MDFKSFIIGLVVGIFGPYMDDLIRKKFLKSSEKKTEKSVKK
>orf00175
(SEQ ID NO: 84)
MGRFILFENLFKPGQLHLAVDMVTDFVSSIHNLKTVF
>orf00177
(SEQ ID NO: 85)
METSISMADFYGKYQNENLELIDVREAHEFQAGHAPGAKNLPLSTLEQGYKELKPDHEYY
VICQGGVRSASTCQFLSSQGLTVTNVEGGMNVWPGQVE
>orf00179
(SEQ ID NO: 86)
LGGKSCLLEDRLCDIAAQTTVAADDVGLFFVQFISFLLDTLSVFDTIVQN
>orf00183
(SEQ ID NO: 87)
MKINDQTRKLAAGCSKHCFEVVDRTDEVSSKHCFEVADRTDEVSNIYTARRR
>orf00184
(SEQ ID NO: 88)
MKLLSIAISSYNAAAYLHYCVESLVIGGEQVGILIINDGSQDQTQEIAECLASKYPNIVR
AIYQENKGHGGVVNRGLAEASGRYFKVVDSDDWWILVPT
>orf00185
(SEQ ID NO: 89)
LKILETLQELESKGQEMDVFVTNFVYEKEGQSRKKSMSYESVLPVRQIFGWDQVGNFSKG
QYIMMHSLIYRTDLLRASQF
>orf00186
(SEQ ID NO: 90)
MYYLPVDFYRYLIGREDQSVNEQVMIKCIDQQLKVNRLLVDQLDLSQVSHPKMREYLLNH
IEITTVISSTLLNRSETAEHLAKKRQLWTYIQQENFEVFQAIRKTMLSRLTKHSVLPDRK
LSNVVYQITKSVYGFN
>orf00194
(SEQ ID NO: 91)
MSLQIKLKKLAKELSKLLKDSNLETVDKDVLENSQEELQKAVLFLADEKGSEHTAAELID
NLKEVIAKLKANA
>orf00202
(SEQ ID NO: 92)
MKIKEQTRKLAAGCSKHCFEVVDKTDEVSYIYLRQGEADAV
>orf00213
(SEQ ID NO: 93)
MSKEKVILAYSGGLDTSVAITWLKKDYDVVSVCMDVGEGKDLDFIHDKALKVGAVESYVI
DVKDEFATDYVLVALQSHAYYEQKYPLVSALSRPLISKKLVEIAHQTGATTIAHGCTGKG
NDQVEYQIAVAKKANEAKK
>orf00215
(SEQ ID NO: 94)
VLDSLVFMGFSMKLIHDLDTHTTHSTAKMLYNVKAIKNDFSIRE
>orf00218
(SEQ ID NO: 95)
MGQLHFITKLLDIKDTNTQIIDVVNRDSHKEIIAKLDYEAPSCPECRSQMKKYYFQKPSK
IPYLETTGMPTRILLRKRRFKCYHCSKMMVAETSIVKKNHQIPRIINQKIAQKLIEKISM
TDIAHQLSISTSTVIRKLNDFHFECNFRNLPKIMSWDVETVRGVTVSIGRWR
>orf00220
(SEQ ID NO: 96)
MRYDFGKVYKEIRESKGLTQEEVCGGVLSRTSLSKIESGKTTPKYENMEFLLRQINMSFE
EFEYICHLYQPSQRTEIMQTYLNMTSIIGSNSLVHFFETCQDYLKTHHDLPIEEIRDMLE
VVIYIRQHGAGELSDHAEQVVKKLWRKIEKQDTWYESDLKILNTILFSFPIEYLHLITGK
ILQRLEVYKNYQHLYDLRIAILLNLSTLYLYNQDKNMCKQICYTLLEDAKNKKSYDRLAI
CYVRIGICTDNAKLIQKGFSLLELTEETSMLSHLKKEVETHYQPKKL
>orf00221
(SEQ ID NO: 97)
MNSKELSISMLKKYPCTMQHDQSDCAAAVVSTVLLSYKKELSIMKIREIIGTDMYGTTVS
GIVSGLNKLNFTVKAVRVALEDLTPKLTFPAILQVKNDLGQNHFVVLHSIKRNSKFYVAD
PASGIRKMSSDELGEIYQGITLFMVPNSDFERGKLKGKGLLDLFGRLIFNQKGLISTVIL
ASFVLSIIGILSSLFSKVIMDEVIPYALKNSLYMFLIVFGIVSFLQTLLSAFRQHVLLFL
SRKIDIPVLMGYYDHIIHLPYSFFGSRRVGDVLTRFQDAMTIKNVFTSVSISLVMDITLS
VISAVVLWTINQSLFLILVFMVIVNIILIYCFKKPYKKINHEQMEANGLLNSQLIESIRN
IDTIKSQHDEEQRLNKIEEKFVHTLEIGYKEGVLQNIQSTISSMTSTMGGLLFMGVGALF
IIDGKMTIGDLLVFQTLSQYFTEPIQNLVGLQLTFQEVQVAVSRLQELMEVDREDIALDY
SIRDFTLCDDIEFKDVTFAYGSRPPVIKDFNLRIKQGEKIAFVGESGAGKSTLVRLLLRF
INPSEGKIRIGENDLSDLDYGKLRKKISYIPQTIELFTGTIIDNLKIGNPSVTYEDMVRV
CRIVGIHDTIQRLQNRYGSFVEEGGQNFSGGEKQRLAIARALLSKADLYIFDEATSNLDS
FSEQIIQDLIFNKIMDKTTIVVAHRLSTILRCDKICFLENGTIVEYGTHEELMAKNGKYA
RMVGLQSVQVNQQIQSQAVLDTEEVTYG
>orf00222
(SEQ ID NO: 98)
MAKLEVKDNKKLVLKSVICKKLHDTKVEDVDQEINKFHQHLQLLKAQIFGPLIVKSCGTT
IHDDGLITTDFEFYIQAHNAQQYSNIYDVQDSISVPYCLYVRFEDSPEYLQYAYSKLDLY
VYENDIQTDGIVYTVYVNSSPEKMVVDIFRPIVSL
>orf00223
(SEQ ID NO: 99)
MKLYNKSELRYSRIFFDKRPPAFAFILIISTAIILSGALVGAAYIPKNYIVKANGNSVIT
GTEFLSAIGSGKVVTLHKSEGDMVNAGDVIISLSSGQEGLQASSLNKQLEKLRAKEAIFQ
KFEQSLNEKYNHLSNSGEEQEYYGKVEYYLSQLNSENYNNGTQYSKIQDEYTKLNKITAE
RNQLDADLQTLQNELIQLQQQGDSSSLSDTTSDDDKAKLETKISEITTKIEALKTNITSK
NSEIDSQQSNIKDMNRTYNDPTSQAYNIYAQLISELGTARSNNNKSITELEANLGVATGQ
DKAHSILASNEGTLHYLVPLKQGMSIQQGQTIAEVSGKEKGYYVEAFVLASDISRVSKGA
KVDVAITGVNSQKYGTLKGQVRQIDSGTISQETKEGNISLYKVMIELETLTLKHGSETVI
LQKDMPVEVRIVYDKETYLDWILEMLSFKQ
>orf00224
(SEQ ID NO: 100)
MELVLPNNYVVIDEEEMMYLDGGAIYIPRWAITGAITGAAYAALAAAGGGGLQLVLASYG
LRSALVAGIVKGLGVLGIHIGNAFANTVIRSIASAGIGAGADWIFTNIIDGWDGRRDNQL
RIG
>orf00226
(SEQ ID NO: 101)
MKDDQKYLLAGLYSLLVAIFYFPLIESKGIFVSILMAVLLLYLIYFIATVIHIVIIKFIR
KKSFKYLVLYPFTYDGSWRFQPINLLYFPEMVRDVIPINLVQEYCQGQPYGLLKKMLKRI
RLSREISLLLATIIVYFFTHRILPLSVFTFIFSYILLFAQSYLGGNTVWIGNRRLIIDDE
FEKILLSKSYIKEISSARYSEYLTCEYKNLTPIILLAIFENLLDSYLIQNQSKVDLDIFY
KVLPLLYKEKYTMGFNYFVSLNYLLYKVGFLGIIYDNEALRDLSKQYLNKNISELQDGSF
EDGIQDAVASKQIVVINEFIACLNSRCVPSQYDRFFYKDRPYIFSRKSPIKG
>orf00227
(SEQ ID NO: 102)
MKNKRYFFDTILIILLLISTIFCVSPVFIKLDILGTPSHAILTFVLAIPLFYILSQCLHT
LLLLVSSIFCKLRPIYFYFIFVIIIGARKYYRILFHQLMGFSPGVAVFYKESQTTKNLFK
FYYFLYFTTLISYYFFFTFVYDKPLLLPLIPFSIIIALVQKLYRIENQQLFLLKSKVLTI
LESKKDCEFNLQDYHEIWKLQSKSELPCVALSYISLIKPYLSESVREQIDLLEVKRFKKI
NHPISLYGMLDVIKLNLYLRHYNEKNKYESMLKKILEVRPDFVLIEQNIDDSLNSSQPLS
LSLAISEIQLLLEVYMGIKHVSIRR
>orf00228
(SEQ ID NO: 103)
MIRKPIIFLLMLPIWGLWIELHLLVSNLQLNLEIPFDFVVSTSLTFFVLILSKIVLDILY
ALKDLYKKEALITIFPFIFIRRKKVNVRFSPYFSFHRKSLSPDDLRSRIIWSFILEIAII
LVFILKIPFAIIMLTTIFFWTIMDINHLVFNKTEFLFNQNKWQKEDSFESDLTKTLKDKI
QKSELSYSDLMSLQLYDAMNQSTFLTDSELFEDILKKIEDSHNTLLCTGLVELLLYEMSI
SNNNNWQEKVDKIRIQLIRINQLDFFYYTSWLRQNFDFCMNREYHKMKSRKLLLSNKKIV
>orf00229
(SEQ ID NO: 104)
MELVLPNNYVVIDEEEMMYLDGGAYLSKRACQGICVALAMSPGTFIALTGAAVLTKKLIN
YIKVGGLGGWLIGAAAGVLAGAAGRIAYCIGYGALNRGCDISGNPYPWDGFISATVR
>orf00230
(SEQ ID NO: 105)
LGWIHICDSKMSNVDKIRKIHIIVCWVYIFLSFRAIINDTEYFLLIFLAFIYSIVSLPLY
SVKNKIVSICLVINSILLMSFPILINKFFPESFSTYIVLISVFITELIIFHLIGKDFDTK
LTNEYKKISQFRSKVSQSPWIKYLEISSFILTIFPSILYGTVDNHVLTLIFLIKICVDTT
IKFLFIRLFDTSTLMKRRIFFLFALDVIAYLFLGYLLVIQKAGYLFSVLLLFSNFSVPFI
KAKEYELFKNSK
>orf00232
(SEQ ID NO: 106)
MNKKKMILTSLASVAILGAGFVASSPTFVRAEEAPQVVEKSSLEKKYEEAKAKYDAAKKD
YDEAKKKAAEAQKKYEEDQKKTEEKAKKEKEAAKEVDDASLAVQKAHVEYRKVLDSRNSY
RNPSDYAKKLAEADKKITEETTKLTNAQTKFQSIRTTIVVPGQSELAETKKKAEEAKAEE
KVAKRKYDYATLKVALAKKEVEAKELEIEKLQDEISTLEQEVATAQHQVDNLKKLLAGVD
PDDTEAIEAKLKKGEAELNAKQAELAKKQTELEKLLDSLDPEGKTQDELDKEAAEAELNK
KVESLQNKVADLEKEISNLEILLGGADSEDDTAALQNKLATKKAELAKKQTELEKLLDSL
DPEGKTQDELDKEAAEAELDKKVESLQNKVADLEKEISNLEILLGGADSEDDTAALQNKL
ATKKAELEKTQKELDAALNELGPDGDEEETPAPAPQPEQPAPAPKPEQPAPAPKPEQPAP
APKPEQPAKPEKPAEEPTQPEKPATPKTGWKQENGMWYFYNTDGSMATGWLQNNGSWYYL
NANGSMATGWVKDGDTWYYLEASGAMKASQWFKVSDKWYYVNSNGAMATGWLQYNGSWYY
LNSNGAMATGWAKVNGSWYYLNANGSMATGWVKDGDTWYYLEASGAMKASQWFKVSDKWY
YVNSNGAMATGWLQYNGSWYYLNSNGAMATGWAKVNGSWYYLNANGSMATGWVKDGDTWY
YLEASGAMKASQWFKVSDKWYYVNSNGAMATGWLQYNGSWYYLNSNGAMATGWAKVNGSW
YYLNANGSMATGWVKDGDTWYYLEASGAMKASQWFKVSDKWYYVNGLGALAVNTTVDGYR
VNANGEWV
>orf00233
(SEQ ID NO: 107)
MKIRRRYTHIIRIICILTISFKKQFLSSSLSSLTKRVIMNTAQATFNREAHTTFNRE
>orf00252
(SEQ ID NO: 108)
LKKRMNRWQFLLNQSKEMVGILLLKVKEQELIEFVVNL
>orf00253
(SEQ ID NO: 109)
LIKVIKRKAFGFRNFNNFKKRILMTLNIKKESTNFVLSRL
>orf00257
(SEQ ID NO: 110)
MTYNEKRLINSLERGHMEQLKNTTDLLGLEDKNIKILSVLKYQTHLVVQAKLDSPAPPCP
HCQGKMIKYDFQKASKIPLLDCQGLPTVLHLKKRRFQCKNCLKVVVSQTSIVKKNCQISN
MVRQKIAQLLLEKQSMTEIAHRLAVSTSTVIRKLREFKFETDWTKLPKVMSWDEYSFKKS
KMSFIAQDFESKSILAILDGRTHAVIRNHFQRYQREVRELVEVITMDMYSPYYRLAKQLF
PKAKIVLDRFHIVQHLSRAMNRVRIQIMNQFDRKSLEYRALKRFWNPRFFVSRLGLNQST
GLIYYTRIASSSVRNDSISPRFECT
>orf00258
(SEQ ID NO: 111)
MGYSLKKSRTYCEQDPEKVNRFLKELNHLSYLTPIYIYETGVETYFYLEYDRALSRQLVS
LEEDIII
>orf00265
(SEQ ID NO: 112)
LREGCSIYDNLYPSRIVVGDETVEGRKIAELFLSISTHSTANIKNVMLVSPTEAEAIKLF
SNTFLALRVAFFNELDFFAERRSLNAEVVIKGVCLDPRIGNFYNNPSFEFGGYCLPKDTK
QLKKEFIEINAPVIEAIDISNTNRKQFIVKQILERKPKIVGIYKLGMKYNSDNYKESAIL
SIINELLIVGIKILVYEPNLNVSIDNVIFEKNFELFTKQSDLIVANRWDRGLEAYKDKVY
TRGIWIRD
>orf00268
(SEQ ID NO: 113)
MLNLQFAETMELTEAELETVYGGEFGNNAVIPAGAWGGLGTSWSITNFWKKYFNHDSSTV
NRRHY
>orf00272
(SEQ ID NO: 114)
MKIKEQTRKLAAGCSKHRFEVADRIDEVSSKHCFEVVDRTDEVSNHTYGKVKLTWFEESF
EEYK
>orf00338
(SEQ ID NO: 115)
LNTSYSFGKKDQFALEHCFCIKLSIFARAVTLFVSCIN
>orf00359
(SEQ ID NO: 116)
MLIGEGYRTFPVLIYTQFISEVGGNSAFAIMAIIIALAIFLIQKHIANRYSFSMNLLHPI
EPKKTTKGKMAAIYATVYGIIFISVLPQIYLIYTSFLKTSGMVFVKGYSPNSYKVAFNRM
GSAIFNTIRIPLIALVLVVLFTTFISYLAVRKRNLFTNLIDSLSMVPYIVPGTVLGIAFI
SSFNTGLFGSGFLMITGTAFILIMSLSVRRLPYTIRSSVASLQQIAPSIEEAAESLGSSR
LNTFAKITTPMMLSGIISGAILSWVTMISKLSTSILLYNVKTRTMTVAIYTEVLRGNYGV
AAALSTILTVLTVGSLLLFMKISKSNSITL
>orf00360
(SEQ ID NO: 117)
LIIIASMSTPFVGAYSWILLLGRNEVITKFLTNALYLPAIDIYGFKGIILVFTLQLFPLV
FLYVAGTMNSIDNSLLEAAESMGSFGFKPIVTVVLPLLVPILLAAPCLYL
>orf00362
(SEQ ID NO: 118)
LLSTTEFIGLSIRILSNLHESKILVGLLNQFFFWNLLLHKTKSNVVSDSQMWENSVVLEN
QPDIAFAGFHIIDFCIIEVKFSIFDTVETCNHTKKGRFPTS
>orf00380
(SEQ ID NO: 119)
VTAPTSITPLLVNTHERKSSQSLTSCLVYVVKTVLTSQHLIYSKLKLK
>orf00382
(SEQ ID NO: 120)
MITIKKQEIVKLEDVLHLYQAVGWTNYTHQPEMLEQALSHSLVIYLALDGDAVVGLIRLV
GDGFSSVLVQDLIVLPIYQRQGIGSALMKEALEDYKDAYQVQLVTEQTERTLGFYRSMGF
EILSTYNCIGMTWMNRKK
>orf00441
(SEQ ID NO: 121)
MGAFVLFLFQLTINRYKKKSFYWYKEVIESNGETLDN
>orf00465
(SEQ ID NO: 122)
VAIDKIAGITSEKDSRAHQIFRISPTCSRCFCNDELVKWVARTIFLQFTKRCCLRSGNIT
RSNSVTLDIGSTVFRRNVAGQHFQAPFSSSISANCFTSQFAHHRTNIDNLSMPFLYHRRN
NCL
>orf00466
(SEQ ID NO: 123)
LFDLLDHGLDTVLVCHVTDISMGFDANFTISFNPFIDQILIDIVKDNSSAGFSVGFGNSK
SNSIRSAGDESNFSF
>orf00478
(SEQ ID NO: 124)
MKSLARLLNIHVFISIFLFFALISGAVSHTVLLLLLLFLPALNKGLEKIQSKRIPVLNAA
LFFLLISFPQLLTNPVQWKFSIFLVVTIISSLAYFYNFYQVVKEVDQKQLI
>orf00480
(SEQ ID NO: 125)
LEAAGEIETEFQGWIVLVVFNHIDSLSRDTDILGEFELGNTQFLAKFFHTIHLVSFLIYV
VYI
>orf00485
(SEQ ID NO: 126)
MVDRTDEVSSKHGFEVVDKEKLMWFEEVFEECKKILVS
>orf00492
(SEQ ID NO: 127)
MEGVNHVDIIKVSCGSFISQVNWMMKGKIPNREGFKFSVARLDAIDLVVVHIGHTRCQFS
RTGSRSGYDNQVATDFDVVVFAHAFWGNDVIHIRRISFDWIMKIRINSVFLKLVAEGICS
GLTSVLCNDNGTNKNP
>orf00493
(SEQ ID NO: 128)
MFNVASINGNHNLNLLFQFLQELDFVVRFITRKDTSSVEIF
>orf00495
(SEQ ID NO: 129)
LFFHFLPLDSIIIKNWKLGNYGAKKEIKKIKQTLAQNFKKCYHIL
>orf00498
(SEQ ID NO: 130)
MQLTSVTAPTGTDNENIQKLLADIKSEYRFDGRPEFVLLGCLQESDCR
>orf00501
(SEQ ID NO: 131)
MIDIHSHIVFDVDDGPKSIEDSKALLREAYNQGVRMIVSTSHRRKGMFETPEEKIVTNFI
KVREIAKEVADDLVIAYGAEIYYTLDALEKLEKKKFLPLMIVVML
>orf00502
(SEQ ID NO: 132)
MHTSYREIHTRLSNILMLGITPVIAHIERYDALENNEKRVRELIDMGCYTQIDSYHVSKP
KFFGEKYKFMKKRARYFLERDLVHVVASDMHNLDSRPPYMQQAYDIIAKKYRAKKAKELF
VDNPRKIIMDQLI
>orf00503
(SEQ ID NO: 133)
MKEQNTLEIDVLQLFRALWKRKLVILLVAIITSSVAFAYSTFVIKPEFTSTTRIYVVNRN
QGEKSGLTNQDLQAGSYLVKDYREIILSQDVLEEVISDLKLDLTPKGLANKIKVTVPVDT
RIVSVSVNDRVPEEASRIANSLREVAAQKIISITRVSDVATLEEARPAISPSSPNIKRNT
LIGFLAGGIGTSVIVLLLELLDTHVKRPEDIEDTLQMTLLGVVPNLGKLK
>orf00505
(SEQ ID NO: 134)
MAKGHHIKLKVKDKIANVLTCNTISINSITSHSNSTQFMPFGMVLTQPLNIRRHPVFSNF
NLSSFYILTERTIQ
>orf00506
(SEQ ID NO: 135)
MKIAIAGSGYVGLSLAVLLAQHHEVKVIDVIKDKVESINNRKSPIKDEAIEKYLVEKELN
LEASLDPAHVYKDVEYAIIATPTNYDVDLNQFDTSSVEAAIKTCMEYNDTCTIVIKSTIP
EGYTKEVREKFNTDRIIFSPEFLRESKALYDNLYPSRIVVGTDLDDSELTKRAWQFADLL
KGGAIKEEVPILVVAFNEAEVAKLFSNTYLATRVAYFNEIDTYSEVKGLNPKTIIDIVCY
DPRIGSYYNNPSFGYGGYCLPKDTKQLKASFRDVPENLITAVVQSNKTRKDYIAGAILAK
QPSVVGIYRLIMKSDSDNFRSSAVKGVMERLDNYGKEIVIYEPTIECDTFMGYRVIKSLD
EFKNISDIVVANRMHDDLRDIQEKLYTRDLFGRE
>orf00507
(SEQ ID NO: 136)
MYTFILMLLDFFQNHDFHFFMLFFVFILIRWAVIYFHAVRYKSYSCSVSDEKLFSSVIIP
VVDEPLNLFESVLNRISRHKPSEIIVVINGPKNERLVKLCHDFNEKLENNMTPIQCYYTP
VPGKRNAIRVGLEHVDSQSDITVLVDSDTVWTPRTLSELLKPFVCDKKIGGVTTRQKILD
PERNLVTMFANLLEEIRAEGTMKAMSVTGKVGCLPGRTIAFRTEILRECIHEFMNETFMG
FHKEVSDDRSLTNLTLKKGYKTVMQDTSVVYTDAPTSWKKFIRQQLRWAEGSQYNNLKMT
PWMIRNAPLMFFIYFTDMILPMLLISFGVNIFLLKILNITTIVYTASWWEIILYVLLGMI
FSFGGRNFKAMSRMKWYYVFLIPVFIIVLSIIMCPIRLLGLMRCSDDLGWGTRNLTE
>orf00508
(SEQ ID NO: 137)
LIFEKEKCFLMLRKNLKYQIMTRAGTILAILFFIILGIIVEVLF
>orf00509
(SEQ ID NO: 138)
MKKVKKAVIPAAGLGTRFLPATKALAKEMLPIVDRPTIHFVIEEALRSGIEDILVVTGKS
KRSIEDYFDSTFELEYSLRKQGKMELLKSVNESTDIKVHFVRQSSPRGLGDAVLQAKSFV
GDDPFVVMLGDDLMDITDSTAVPLTRQLMDDYNATQASTIAVMPVRYEDVSSYGVISPRL
ESSNGLYSVDAFVEKPKPEEAPSNLAIIGRYLLTPEIFSILETQKPGAGNEIQLTDAIDT
LNKTQSVFAREFVGKRYDVGDKFNFMKTSIDYALQHPQIKESLKNYVIALGKQLEKLDDC
SSSGHL
>orf00510
(SEQ ID NO: 139)
MNCIESYQKWLNVPDLPAYLKDELLSMDDKTKEDAFYTNLEFGTAGMRGYIGAGTNRINI
YVVRQATEGLAKLVESKGETAKKAGVAIAYDSRHFSPEFAFESAQVLAAHGIKSYVFESL
RPTPELSFAVRHLGAFAGIMVTASHNPAPFNGYKVYGSDGGQMLPADADALTDYIRAIDN
PFAVALADLEEAKSTGLIEVIGETLDSAYLEEVKSVNINQDLIDQYGRDMKIVYTPLHGT
GEMLARRALAQAGFESVQVVEAQAKPAPDFSTVASPNEESQAAFALAEELGRQVDADVLV
ATDPDADRLGVEIRQADGSYWNLSGNQIGALIAKYILEAHKQAGTLPKNAALAKSIVSTE
LVTKIAESYGATMFNVLTGFKFIAEKIQEFEEKHNHTYMFGFEEG
>orf00520
(SEQ ID NO: 140)
MNKGLFEKRCKYSIRKFSLGVASVMIGAAFFGTSPVLADSVQSGSTANLPADLATALATA
KENDGRDFEAPKVGEDQGSPEVTDGPKTEEELLALEKEKPAEEKPKEDKPAAAKPETPKT
VTPEWQTVEKKEQQGTVTIREEKGVRYNQLSSTAQNDNAGKPALFEKKGLTVDANGNATV
DLTFKEDSEKGKSRFGVFLKFKDTNNNVFVGYDKDGWFWEYKSPTTSTWYRGSRVAAPET
GSTNRLSITLKSDGQLNASNNDVNLFDTVTLPAAVNDHLKNEKKILLKAGSYDDERTVVS
VKTDNQERVKTEDTPAQKETGPVVDDSKVTYDTIQSKVLKAVIDQAFPRVKEYTLNGHTL
PGQVQQFNQVFINNHRITPEVTYKKINETTAEYLMKLRDDAHLINAEMTVRLQVVDNQLH
FDVTKIVNHNQVTPGQKIDDERKLLSSISFLGNALVSVSSDQTGAKFDGATMSNNTHVSG
DDHIDVTNPMKDLAKGYMYGFVSTDKLAAGVWSNSQNSYGGGSNDWTRLTAYKETVGNAN
YVGIHSSEWQWEKAYKGIVFPEYTKELPSAKVVITEDANADKKVDWQDGAIAYRSIMNNP
QGWEKVKDITAYRIAMNFGSQAQNPFLMTLDGIKKINLHTDGLGQGVLLKGYGSEGHDSG
HLNYADIGKRIGGVEDFKTLIEKAKKYGAHLGIHVNASETYPESKYFNEKILRKNPDGSY
SYGWNWLDQGINIDAAYDLAHGRLARWEDLKKKLGDGLDFIYVDVWGNGQSGDNGAWATH
VLAKEINKQGWRFAIEWGHGGEYDSTFHHWAADLTYGGYTNKGINSAITRFIRNHQKDAW
VGDYRSYGGAANYPLLGGYSMKDFEGWQGRSDYNGYVTNLFAHDVMTKYFQHFTVSKWEN
GTPVTMTDNGSTYKWTPEMRVELVDADNNKVVVTRKSNDVNSPQYRERTVTLNGRVIQDG
SAYLTPWNWDANGKKLSTEKEKMYYFNTQAGATTWTLPSDWAKSKVYLYKLTDQGKTEEQ
ELTVKDGKITLDLLANQPYVLYRSKQTNPEMSWSEGMHIYDQGFNSGTLKHWTISGDASK
AEIVKSQGANDMLRIQGNKEKVSLTQKLTGLKPNTKYAVYVGVDNRSNAKASITVNTGEK
EVTTYTNKSLALNYVKAYAHNTRRDNATVNDTSYFQNMYAFFTTGSDVSNVTLTLSREAG
DQATYFDEIRTFENNSSMYGDKHDTGKGTFKQDFENVAQGIFPFVVGGVEGVEDNRTHLS
EKHYPYTQRGWNGKKVDDVIEGNWSLKTNGLVSRRNLVYQTIPQNFRFEAGKTYRVTFEY
EVGSDNTYAFVVGKGEFQSGRRGTQASNLEMHELPNTWTDSKKAKKATFLVTGAETGDTW
VGIYSTGNASNTRGDSGGNANFRGYNDFMMDNLQIEEITLTGKILTENALKNYLPTVAMT
NYTKESMDALKEAVFNLSQADDDISVEEARAEIAKIEALKNALVQKKTSLVADDFASLTA
PAQAQEGLANAFDGNLSSLWHTSWGGGDVGKPATMVLKEPTEITGLRYVPRGSGSNGNLR
DVKLVVTDESGKEHTFTTTDWPDNNKSKDIDFGKTIKAKKIVLTGTKTYGDGGDKYQSAA
ELIFTRPQVAETPLDLSGYEAALAKAQKLTDKDNQEEVASVQASMKYATDNHLLTERMVE
YFADYLNQLKDSATKPDAPTVEKPEFKLSSLASDQGKTPDYKQEIDRPETPEQILPATGE
SQSDTALFLAGVSLALSALFVVKTKKD
>orf00523
(SEQ ID NO: 141)
LQIAQESSQDTDGINPPVVEEAMVFDRNDCLNQICGNIISLGIDAAFRTQVSNELIFIVV
DFTRSCCN
>orf00525
(SEQ ID NO: 142)
MLNLMWMKIFHRNRTFLFCFLDFKVDVISIINARIVRR
>orf00526
(SEQ ID NO: 143)
MYNSQALRQIVVVGSIDHLFKRHSSICEIFGLRKRCLSFLW
>orf00537
(SEQ ID NO: 144)
MKLLKKTMQAGLTVIFFGLLATNTVFADNSEGWQFVQENGRTYYKKGDLKETYWRVIDGK
YYYFDSLSGEMVVGWQYIPFPSKGSTIGPYPNGMRLEGFPNSEWYYFDKNGVLQEFVGWK
TLEIKTKDSVGRKYGEKREDSEDKEEKRYYTNYYFNQNHSLETGWLYDQSNWYYLAKTEI
NGENYLGGERRAGWINDDLTWYYLDPTTGIMQTGWQYLGNKWYYLRSSGAMATGWYQEGT
TWYYLDQPNGDMKTGWQNLGNKWYYLRSSGAMATGWYQEGTTWYYLDQPNGDMKTGWQNL
GNKWYYLRSSGAMATGWYQDGSTWYYLNAGNGDMKTGWFQVNGNWYYAYSSGALAVNTTV
DGYSVNYNGEWVR
>orf00541
(SEQ ID NO: 145)
MTTGWFQVNGRWYYAYSSGALAVNTTVDGYFVNYNGEWVQ
>orf00551
(SEQ ID NO: 146)
MSLADLLEELEAAKDSKKARSMEAYMRHQFSFLGIAVPERNKLYKNIFQKRKKQRLSIGI
LQTLAGKRILENTNMWLLTI
>orf00552
(SEQ ID NO: 147)
MEKILLHNLNQTEFFINKAIGWTLRDYSKTNPTWVTCFIEKNKERMAELSIKEASKYL
>orf00555
(SEQ ID NO: 148)
VLEILKEYLLLEEGDYIFTNNGSPLMITCFNYFLKNSFRKSEIKKDDFVLTAHVFRYSHI
SLLAELEVPITAIMDRVDYTNETKILSVYTHVTEKMKSNITEKLDKLVLEND
>orf00580
(SEQ ID NO: 149)
LVIFKNCSHCTSNCKSRTVQGMKEFHLAICFITVTDLSTTGLEIFXXXFHSLIN
>orf00581
(SEQ ID NO: 150)
MNXXARGFSFVCKDFEVAAHFASSDIGSNLIDMAPRNLDKLFDIDIWVKFQSLISDKEFP
NFPSDREVGSACRTEEYCFVK
>orf00587
(SEQ ID NO: 151)
LQKPLFQILQKLVKISQAFIHDSNFFLAHAINNFXXHSFIN
>orf00590
(SEQ ID NO: 152)
VGFSLLLLLIFCLFCLLFNVSNQVTNCFQVIFCFDLDIKSIFDF
>orf00614
(SEQ ID NO: 153)
VNIDSSEFYISHITDGIFDSFLDSNRYLRNFYSVLKVEIDICCEFFVHVFKINATAE
>orf00615
(SEQ ID NO: 154)
VNTLYLCSSNSNDFFKYTWGDNDFAKLFFNSHRMTSF
>orf00625
(SEQ ID NO: 155)
LFSPRPGGDNGKGTTFLNFFLNIHKFSFFDSLFFLFQ
>orf00627
(SEQ ID NO: 156)
VKEEKKAIVLGADNAYMDKVETTLKSLCVHHYNLKFYVFNDDLPREWFQLMEKRLETLNS
EIVNV
>orf00643
(SEQ ID NO: 157)
LAQISILHFDFLSIDKHSHTVFNTLRKSLQTTLALSATSKQCFEQLAASFLVCSLIFIEY
KV
>orf00652
(SEQ ID NO: 158)
MSLITHRRFISSKVIRQKFVDNQIDLKYYIWRYSHALCGIDVAKNKHDVTALNVSGKTVL
KPLTFSNNKAGFELLDLSLRQLNQDYLIALEDTGHYAFNLLNFLHEQGYKVYTYNPLLIK
KFAKSLLLRKTKTDKKDAHGIALKLLSDPNREQFQHDNRQVELKILARHIHRLKKKQSDW
KVQYTRCLDIIFPELDKIVGKHSEYTYQLLTCYPNPQKRLEAGFDKLIEIKRLTASKIQD
ILSVAPRSIGTTSPAREFEIIENIKHYKRLIDKAETCVNDLMAEFNSVITTVTGIGNRLG
AVILAEIQNIHAFDNPAQLQAFAGLDSSIYQSGQIDLAGRMVKRGSPHLR
>orf00654
(SEQ ID NO: 159)
MDTKSSCLITTGRNDSPSTCLPRVASNNDRFSSEFRIIPDFHCSKKGIHVNMDDFS
>orf00657
(SEQ ID NO: 160)
MDKMKPVFQALNKELIQENLTLTIICVGGYVLEYHGLRATQDVDAFYDQNQKINEIIARV
GKQFNLNTHEELWLNNHVANMNKQPPLSLCESLYSFENLTVLVVPIEYVLGMKMMSIREQ
DLKDIGAIIKYKNFHSPFDTFKYLKDMGFDTIDLSVLLEGFSYAYGMDWLEKFFKENQDK
LREFY
>orf00663
(SEQ ID NO: 161)
MIPLYRTDNDITKFFTKIRNGHLAKTAGGLDDKFHEANASTSKAFDRQGVGEVNDIRDSA
GSQELRINDKRKTENILFLEIRVRIFRVPHPNDSFFSSHFLG
>orf00664
(SEQ ID NO: 162)
VLSQGDKDITILDAGLLKNGKIGPVTKDTNDIKATDNMIENSFVLLNQQNIMLFCNQGAT
EGKTNFSPSDKDNFHNKTYFFMM
>orf00669
(SEQ ID NO: 163)
MKIKEQTRKLAAGCSKQCFEIVDRTDEVSSKHGFEVVDETDEVSSKHGFEIVDETDEVSN
HTYGKAKLTWFEEIFEEYKMMGKAGQLVFFDVYRLVRQVS
>orf00698
(SEQ ID NO: 164)
MEKFNFKNNIGQENKLLQIEIYKFTNFCKLQNYTSVNIFSKDIFEAIVN
>orf00701
(SEQ ID NO: 165)
VRIKSIYWNFGQNKPEKSFRYIDTSSIDRKKNIINYKNLQYLSPEQAPSRARKLVSQNSV
LFSTVRPYLKNIAVVRELKEYLIASTAFIVLDTLLNETYLKYYLLSDNFINRVNNKSTGT
SYPAINDYNFNLLLIPLPPLSEQQRIVEAIESALEKVDEYAESYNRLEQLDKEFPDKLKK
SILQYAMQGKLVEQDPNDESVEVLLEKIRAEKQKLFEEGKIKKKDLDISIVSQGDDNSYY
GNIPMNWVVIKIKDIFSINTGLSYKKGDLSINKGVRIIRGGNIKPLEFSLLDNDYYIDTQ
FISSEQVYLKHNQLITPVSTSLEHIGKFARIDKDYDGVVAGGFIFQLTPFESSEIISKFL
LFNLSSPLFYKQLKAITKLSGQALYNIPKTTLSELLIPLAPFEEQELITQKVEKLFEKVN
QLWK
>orf00720
(SEQ ID NO: 166)
MIRKVNHNIFKHRSVVIFTLTNSYFCKFFINDISISFHSHQHFCWIIIQIK
>orf00724
(SEQ ID NO: 167)
LDNIHIVLDSLNAVSGIQDFICDGLAIFCNQITSGCSSCK
>orf00735
(SEQ ID NO: 168)
MNIAWILLYALVINGLEIVIFFKVDGIGLTFDRIFKAFLLKFLLGIIFTTFQFLAVSKYL
SYFIEPLFGIGLSFLLLRGLPKKILIFYGLFPMILVELFYRGVSYFVLPFLGQGIVDGDG
NPIFLLIMIFVCFIVLVFLKWLDYDFTRLRREFLDTGFQKSLTKINWAMGAYYLVMQSLS
YLEYEQGIQSTTVRHLILVFYLLFFMGGIKKLDTYLKEKLQEELNQEQTLRYRDMERYSR
HIEELYKEIRSFRHDYTNLLTSLRLGIEEEDMEQIKEIYDSVLRDSSQKLQDNKYDLGRL
VNIRDRALKSLLAGKFIKAREKNIVFNVEVPEEIQVEGMSLLDFLTIVSILCDNAIEASA
EASQPHVSIAFLKNGAQETFIIENSIKEEGIDISEIFSFGASSKGEERGVGLYTVMKIVE
SHPNTNLNTTCQNQVFRQVLTVIHAE
>orf00737
(SEQ ID NO: 169)
MISQEDILKACEVAEIRQDIERMPMGYQTQLSDGAGLSGGQKQRIALARALLTKSPVLIL
DEATSGLDVLTEKKVIDNLMSLTDKTILFVAHRLSIAERTNRVIVLDQGKIIEVGIHQEL
MQAQGFYHHLFNK
>orf00738
(SEQ ID NO: 170)
MSSKISIGQLITFNTLLSYFTTPMENIINLQTKLQSAKVANNRLNEVYLVESEFQVQENP
VHSHFLMGDIEFDDLSYKYGFGRDTLTDINLTIKQGDKVSLVGVSGSGKTTLAKMIVNFF
EPYKGHISINHQDIKNIDKKSLAPSY
>orf00740
(SEQ ID NO: 171)
MKSTLGIISVGLVITYILQQVMSFSRDYLLTVLSQRLSIDVILSYIRHIFELPMSFFATR
RTGEIISRFTDANSIIDALASTILSLFLDVSILILVEGVLLAQNPNLFLLSLISIPIYMF
IIFSFMKPFEKMNHDVMQSNSMVSSAIIEDINGIETIKSLTSEENRYQNIDSEFVDYLEK
SFKLSKYSILQTSLKQGNKISSEYPYPMVWRSISHVE
>orf00742
(SEQ ID NO: 172)
MTSYKRTFVPQIDARDCGVAALASIAKFYGSDFSLAHLRELAKTNKEGTTALGIVKAADE
MGFETRPVQADKTLFDMSDVPYPFIVHVNKEGKLQHYYVVYQTKKDYLIIGDPDPSVKIT
KMSKERFFYEWTGVAIFLATKPSYQPHKDKKNGLLSKLPSSDFQTKISHCLHCSLKLIGH
YYQYRWFLLSPRNLG
>orf00767
(SEQ ID NO: 173)
MGLIKTLAKIYGNYFLTVQGVKVMKTIKKDDHVVVGLGKLFIADKLMDTARWLIKPEDKK
>orf00768
(SEQ ID NO: 174)
MKFFWGLLAIIFIKPIIGIVKFFWMIISFAVQLLFYKIVFKILDWLFKLI
>orf00776
(SEQ ID NO: 175)
MHSQTFQFLLMTDKTSLLHRKHRSFIRNIHSKFLILFDLLCGILSRNDSNHNPIS
>orf00779
(SEQ ID NO: 176)
MARTELPDKIETERLVLRVRTVADAEDIFDYASLPEIAYPAGFPPVKTLEDEIYYLEHIL
PERNQKENLPAGYGIVVKGTDKIVGSVDFNHRHEDDVLEIGYTLHPDYWGRGYVPEAARA
LIDLAFKDLGLHKIELTCFGYNLQSKRVAEKLGFTLETRIRDRKDVQGNRCDSLIYGLLK
SEWEE
>orf00781
(SEQ ID NO: 177)
MSDVKEEVSSLSEKQLRQIDVEYAELNDSDIIERLAYLEINNNEKRIVISDIEPTKEIMS
VSDQIFEIQKNFQKIKNMFELFISDVSDFLSIKNKLESKELEIEEADVNRFMIHLLSSGK
LFVDFNENQIKQKYSKDSEEFDCIHGFASYQYDINFTYRFCHSLRNYSQHTDLPINEVKA
VSPDDETVIIDFYIDLDYLLNSNFKWKKLKGELIKLNQETSKIDAIALVKEYFNALTELY
GNYNKLFLKLNHNTLVDIKSKLESLKLKHSRYYISKISKYDLKYNPGNYTMSPLAAFAEI
EEIYIELSKIGLVKIVNKSN
>orf00785
(SEQ ID NO: 178)
MSKHPHYELLNLIGYGLAKFDKLFIKEFQCSSKSEFYRYVVSLGIAETTGVVKNRMDLFD
PYFDNNRKGWWQKAEVYRFRKDLIDMMFGNEDVHSYAEIVKMLLASEGKKTGITIVEKPI
VRTKFKRLQETGMEAENYFILHFDKEEKFQGGQLTDARLYGDGYDFQVDVQEYSYLAEVK
GIRKSKGRVRLTAKEFEKVKEFQSDFILSLVTNLDDIPKLVLIDNPLKHFEFKKNIIKNE
IIEYRSVEDLY
>orf00787
(SEQ ID NO: 179)
LSTCWNGKFCHICVALFHCFRAFKLALNEILCLLTNVSFIFVSVAF
>orf00788
(SEQ ID NO: 180)
LLRKQEREYLRAENAILKKLRELRLKEEKEKEERQKLFKN
>orf00809
(SEQ ID NO: 181)
LKHLFCHFNPLWIDEIIRLAYKDQDTKDVKSKVKIGN
>orf00856
(SEQ ID NO: 182)
MKEIAFDAFYQLYQNDQLSLVDVREVDEFAALHLEGAHNLPLSQLADSYD
>orf00859
(SEQ ID NO: 183)
MVSNHKIACFQLFDKVGIFSLLDELNSLANKAHINLLNCF
>orf00871
(SEQ ID NO: 184)
MDFFFMNEVKEQVLFRDNHSEHIFWIEGVSDFMIKVNTALW
>orf00878
(SEQ ID NO: 185)
MKINEQTRKLAAGCSKHCFEVVDRTDEVSNHTHGKATLTWFEEIF
>orf00885
(SEQ ID NO: 186)
MKINEQTRKLAAGCSKHSFEVVDKTDEVSSKHGFEVVDETDEVSSKHGFEVVDETDEVSN
HIYGKATLTKFELDFRRV
>orf00890
(SEQ ID NO: 187)
MEELVTLDCLFIDGTKIEANANKYSFVWKKTTEKFSAKLQEQIQVYFQEEITPLLIKYAM
FDKKQKRGYKQSAKNLANWHYNDKEDSYIHPDGWCYRFHHIKYQKTQTDFQQEIKVYYAD
EPESAPQKGLYMNERYQNLKAKECQALLSPQDRQIFAQRKIDVEPVFGQIKACLGYKRCN
LRGKRQVRIDMGLVLMANNLLKHSEMK
>orf00892
(SEQ ID NO: 188)
MHIHYNTNQTTLPLEISSFLPQDHLVFTIEKVVNTLEDCHFHAFYHAFDRPSYHLKMLVS
TLLFAYSQGIFSGRKIEKWKS
>orf00894
(SEQ ID NO: 767)
LRLWVIFVIMKVMKSYNTLNDYYRKLFGEKTFKVPIDAGFDCPNRDGTVAHGGSTFCTVS
GSGDAIVAPDAPIREQFYKEIDFMHRKWPDVQKYLVYFQNFTNTHEKVEVIRERYEQAIN
EPGVVGINIGTRPDCLPDETIEYLAELSECMHVTVELGLQTTYEATSDLINRVHSYEL
>orf00896
(SEQ ID NO: 189)
VETVKRLRKYPKIEIVSHLINGLPGETHEMMVENVRRCVTDNDIQGIKLHLLHLMTNTRM
QRDYHEGRLQLMSQDEYVRVICDQLEIIPKHIVIHRITGDAPRDMLIGPMWSLKKWEVLN
SIEMEMRRRGSVQGCKAVKQEFENEKTT
>orf00908
(SEQ ID NO: 190)
VQVCVFTNFCFFHCFSSLANCRLFNLRGICLPCISYQ
>orf00915
(SEQ ID NO: 191)
VFKKDRFSIRKIKGVVGSVFLGSLLMAPSVVDAATYHYVNKEIISQEAKDLIQTGKPDRN
EVVYGLVYQKDQLPQTGTEASVLTAFGLLTVGSLLLIYKRKKIASVFLVGAMGLVVLPSA
GAVDPVATLALASREGVVEMDGYRYVGYLSGDILKTLGLDTVLEETSAKPGEVTVVEVET
PQSTTNQEQARTENQVVETEEAPKEEAPKTEESPKEEPKSEVKPTDDTLPKVEEGKEDSA
EPSPVEEVGGEVESKPEEKVAVKPESQPSDKPAEESKVEPPVEQAKVPEQPVQPTQAEQP
STPKESSQQENPKEDRGAEETPKQEDEQPAEAPEIKVEEPVESKEETVNQPVEQPKVETP
AVEKQTEPTEEPKVEVTSIPQTTRYEEDLTKEHGTREVVKEGKNGSRTVTTPYILNATDG
TTTEGTSTTDEAEMEKEVVRVGTKPKEKLAPVLSLTSVTDNAMLRSARLTYHLENTDSVD
VKKIHAEIKNGDKVVKTIDLSKERLSDAVDGLELYKDYKIVTSMTYDRGNGEETSTLEET
PLRLDLKKVELKNIGSTNLVKVNEDGTEVASDFLTSKPVDVQNYYLKVTSRDNKVFRLTV
EKIEEVTEEGQPLYKVTAKAPNLIQHTDATKMQDEYVYYIEKTRATDGDIYYNFNDLVNA
MNKNKTGTFKLGADLNATGVPTPAKSYVTGDFRGTLTSVDGEHYTIHNTSRPLFNNIIGG
TIKDINLGNVNIHMPWANNVASLANIIKGGTTIENVKVTGNVLGKDWVSGFIDKIDSGGT
LRNVAFIGNVTSVGTGGSFLTGIVGENWKGLVEQAYVDANIRGKKAKAAGIAYWSQNGGD
NYAVGRYGAIKKSVVKGSIDVEKPIEVGGAVGSLNYLGYIEDTVAMMKVKNGEIFYGSHD
IDTDPYYTGERVNRNFIVDGVSEGKSSYKYSKQQNRIKSVSQEEADKKIKELAITADKYA
ITEPIVNKLNALTTRDNEYRTTQDYKADRELAYRNIEKLQPFYNKEWIVDQGNKVPSNSK
LLTTEVLSVTGMKDGQFVTDLSEIDKIMIHYADGTKEEMNVTAVADSKVKQVREYDVTDL
GVVYTPNMVDKNRDQLIADVKAKLSSVELISPEVRALMDKRGKAEENTEGRQNGYIRDLF
LEESFAEVKAGLGKLVKALVENEDYQLNSDEAAMRALIKKVEDNKAKIMMGLAYLNQYYS
FKYAELSIKDIMMFKPDFYGKNVNVLDFLIKIGSSERNVKGDRTLEAYRETIGGTIGINE
LNGFLHYNMKLFTNHIDINDWFKKAIEKNAYVVEQPSTNPAFANKKYRLYEGINNGQHGR
MILPLLNLKNAHLFMISTYNTISFSSFEKYGKDTDEKREKFKSEINKRAKEQVNYLDFWS
RLATDNVRDKLLKSQNVVPTPVWDNHNSPNGWASRHGHIDGKPDYAPIREFFGRINKYHG
YKYGYGAYAYIFAAPQPMDAVYFVMTDLISDFGTSAFTHETTHINDRMAYYGGHWHREGT
DLEAFAQGMLQTPSVSNPNGEYGALGLNMAYERQNDGNQWYNPNPNKLKSRAEIDHYMKN
YNEALMMLDYLEAESVLPKLKGNNDRWFKKMDKQMRKDGQPHQFDKIRDLNNEEKKIQLA
SIEDLVDNNFMTKHGAPGNGTYNPSDFSSAYVNMNMMTGVYGGNSSDGAPGAASFKHNTF
RMWGYFGYENGFIGYASNKYKAEANKAGQTLSDKYIINKVSGGTFNTLEAWKKEWFKQIK
TKAQKGFTAIEIDGKTIDSYEKLKDLFDKAVEEDLKGTGTDKTVKLKEKVYKQLLKNTDG
FSGDLFTAPQA
>orf00933
(SEQ ID NO: 192)
VGDRIFIAFLQKLGLLDNLTGIREKLHPITGQGDSLGIADKDLNAHFIFQISHCIGETWL
SDKELLGCLIHGASFDDFDNIM
>orf00941
(SEQ ID NO: 193)
VSRWDGHSDKGEAPAGKTSYAWIWTKWGEQVAFYCDYD
>orf00955
(SEQ ID NO: 194)
MKLFKPLLTVLALAFALIFITACSSGGNAGPSSGKTTAKARTIDENKKSGELRIAVFGDK
KPFGYVDNDGSYQGYDIELGNQLAQDLGVKVKYISVDAANRAEYLISNKVDITLANFTVT
DERKKQVDFALPYMKVSLGVVSPKTGLITDVKQLEGKTLIVTKGTTAETYFEKNHPEIKL
QKYDQYSDSYQALLDGRGDAFSTDNTEVLAWALENKGFEVGITSLGDPDTIAAAVQKGNQ
ELLDFINKDIEKLGKENFFHKAYEKTLHPTYGDAAKADDLVVEGGKVD
>orf00988
(SEQ ID NO: 195)
MDTPDENGYVADDYRITYLEAHIKAMRDAIYQDGVDLLGYTTWGCIDPVSAGTGEMNKRY
GFIYVDRDNVGNGALKRSKKKSFYWYKDVIDSNGASIG
>orf01015
(SEQ ID NO: 196)
MTEPDFWNDNIAAQKTSQELNELKNTYNTFHKMEELQDEVEILLDFLAEDESVHDELVAQ
LAELDKIMTSYEMTLLLSEPYDHNNAILEIHPGSGGTEAQDWGDMLLRMYTRYGNAKGFK
VEVLDYQAGDEAGIKSVTLSFEGPNAYGLLKSEMGVHRLVRISPFDSAKRRHTSFTSVEV
MPELDDTIEVEIREDDIKMDTFRSGGAGGQNVNKVSTGVRLTHIPTGIVVQSTVDRTQYG
NRDRAMKMLQAKLYQMEQEKKAAEVDSLKGEKKEITWGSQIRSYVFTPYTMVKDHRTSFE
VAQVDKVMDGDLDGFIDAYLKWRIS
>orf01045
(SEQ ID NO: 197)
MQVIKRNGEIAEFNPDKIYQAILKAAQTVYVLTDDLRQNLAQVTKKVVLDLQEAKVERAT
ISMIQSMVEHRLLGAGYITIAEHYISYRLQRDLERSGYGDHIAVHLHFEQIR
>orf01068
(SEQ ID NO: 198)
MELFKTWKKNMVLYGLKSQIGTVYRNNDRTTSFYDVGNFLYLAGELDSRFWEDFVRKYGL
DYKIIISENTNWQDFLHRKVGLNSFTRYSFKDKANFQVEFLNNLVTHLEEGYNIVPIDNH
IYNCFSTEEWSQDLQGDFESYQDFVLKGGFGFVILKNNELIAGISSGLVYRKAVEVEVAT
RPNEQGNGFAKKLGAAMILESLNRDMFPLWDAHNEASKKVAEFLGYELSEPYEAFELEEI
LI
>orf01090
(SEQ ID NO: 199)
LGSDRKALHKPVYLFWCESFDILFCTWSSQFSVLKAFI
>orf01110
(SEQ ID NO: 200)
MKVINQTLLEKVIIERSRSSHKGDYGRLLLLGGTYPYGGAIIMAALAAVKSGAGLVTVGT
DRENIPALHSHLPEPMAFSLQDQQLLKEQLEKAEVILLGPGLRDDASGENLVKQVFVNLS
QNQILIVDGGALTILARTSLSFPSSQLILTPHQKEWEKLSGITIEKQKEDATASVLTSFP
QGTILVEKGPATRIWEVGQSDYYQLQVGGPYQATGGMGDTLAGMIAGFVGQFRQASLYER
VAVATHLHSAIAQELSQENYVVLPTEISRYLPKIMKIICQQDRVSKDKLV
>orf01114
(SEQ ID NO: 201)
VLASNRKFIFFFFRIGILILKNIKSFNQFLALFHKIPSHDGSRKSLSWSDGKSLKXXFIH
>orf01121
(SEQ ID NO: 202)
VLDSKEELKESENDAPKLETPLREEPRLAPQTLLEASEVLENKREESKVGITEPAQDSPI
LAPVEETKEEAVTEKPTNTRSLTAEDLVKISKGELHLENDLIDESFYGEKALDLEGDDYQ
DGIKNKDGKDYLGYNSHPLLADSDGDGLADGEDDNKKEWYVTDRDSLLFMELAYRDDDYI
EKILDHKNLFPSLYLDRQEHKLMHNELAPFWKMKKAYYTDSGLDAFLFETKSDLPYLKDG
TVHMLAIRGTRVNDAKDLSADFVLLGGNKLAQADDIRKVVGELAKDISITKLYMTGHSLG
GYLAQIAAVEDYQKYPDFYNHVLRKVTTFSAPKVITSRTVWDAKNGF
>orf01148
(SEQ ID NO: 203)
MGRNPKTRPEERTELERLQSENEYLRAENAILKKLRELRLKEEKEKEERQKLFKN
>orf01150
(SEQ ID NO: 204)
LSTCWNGKFCHICVALFHCFRAFKLALNEILCLLTNVSFIFVSVAF
>orf01165
(SEQ ID NO: 205)
VVLSTSAILVACGKTDKEADAPTTFSYVYAVDPASLGYSIATRTSRTDVIGNVIDGLMEN
DKYGNVAPSQKDYDLNSTGWAPSYQDPASYLNIMDPKSGSAMKHLGITKGKDKDVVAKPG
LDKYKKLLEDAVSETTDLEKRYEKYAKAQAWSTDSSLLMPTASSGGSPVVSNVVPFSKPY
SQVGIKGEPYIFKGMKLQKDIVTTKEYNEVFKKWQKEKLESNSKYQKELEKYIK
>orf01169
(SEQ ID NO: 206)
LNFDFFIFLAHFIPLFTFSILQENPKTSKKKLYIRLL
>orf01176
(SEQ ID NO: 207)
MGFSMKLIHDLDTHTTHSTAKMLYNVKAIKNDFSIRE
>orf01191
(SEQ ID NO: 208)
LIRIIRNIYRSGEGNTSVFQSFIDQINSNQFCYGSNFDRLRCILLIENFTSICLNSNRMF
SGNGKILSNSSRSTP
>orf01202
(SEQ ID NO: 209)
MIYFDNSATTKPYPEALETYMQVASKILGNPSSLHRLGDQATRILDASRHQIADLIGKKT
DEIFLTSGGTEGDNRVLQGVAFEKAQFGKHIIVSPLPHSAVLE
>orf01223
(SEQ ID NO: 210)
MKIKEQTRKLAAGCSKHCFEVVDKTDEVSSKHGFEVVDETDEVSNHTYGKATLTRIEEIF
EEYKSS
>orf01233
(SEQ ID NO: 211)
LVYAPFSFNILLDYITFDFKILLFSVFLAINRFHNDFIQFLL
>orf01236
(SEQ ID NO: 212)
MSGYSGLSFFEVALAEFLDIVSAVYLEDADGIIVNLWGILDK
>orf01246
(SEQ ID NO: 213)
MEGVAKGRIGRKKNNGIDNRCCHKKRNGRVTWNLFFQKTIDDGDDSTFTRREKHTDEGPK
KDSPPTISREKMINLVRCDINFNQP
>orf01249
(SEQ ID NO: 214)
VDKTDEVSSKHCFEVVDKTDEVSSKHCFEVVDKTDEVSSKHCFEVVDRTDEVSSKHCFEV
VDRTDEVSNRTTVRRS
>orf01251
(SEQ ID NO: 215)
MDYGLYHPCPIVTPSQSSSIVANPASKLISASEELIPDAIAVDFVEVNCY
>orf01254
(SEQ ID NO: 216)
MKKLFQEKFSKKPSHKEIERVQLGCAMMQATFHLMGY
>orf01261
(SEQ ID NO: 217)
VVIGVASATTNIWIIFLSGFAAILAGAFSMAGGEYVSVSTPKDTEEAAVSREKLLLDQDR
GLAKKSLYAAYIQNGECKTSAQLLTNKIFLKNPLKALVEEKYGIEYEEFTNPWHAAISSF
VAFFLRSLPPMLSVTIFPSEYRIPATVLIVGVALLLTGYTSARLGKDPTRTAMIRNLAIG
LLTMGVTFLLEQLFSI
>orf01269
(SEQ ID NO: 218)
MLYVGIDVAKNKHDVTALNVPGKLFLNHSLFQIIKLVLNS
>orf01296
(SEQ ID NO: 219)
MDFEYFYNREAERFNFLKVPEILVDREEFRGLSAEAIILYSILLKQTGMSFKNNWIDKEG
RVFIYFTVEEIMKRRNISKPTAIKTLDELDVKKGIGLIERVRLGLGKPNIIYVKDFMSIF
QVKENDLQKSKNLTSEVKDFNLRSKENELQEVKNLDSNYIENNKSKYSKREYSFGENGLG
TFQNVFLAAEDISDLQIIMNSQLENYIRLPAKLES
>orf01304
(SEQ ID NO: 220)
LLHIRVCKTFDRIPYCMLALFLSKSIGLTILLHKVKTVIFIDDQSNDKTCKICIHISFFR
IKLSQQCQLSFSVYF
>orf01309
(SEQ ID NO: 221)
MTQEDALIVISHIKVLSIVPNRCLKPLDKTFSLYNWIFLSQKYILLQANFLKISRVQLQ
>orf01313
(SEQ ID NO: 222)
VTTHDEPVYEKHGVLHYAVANIPGAVARTSTIALTNVTLPYIEALAGKGFAQAISEDEGL
RQGVTTYQGYLTSLPVAQGLNRDYTDINDLV
>orf01314
(SEQ ID NO: 223)
VFFIDGFIVRCHTVSCFDNATLVNSNVNDTEPGRICLTISSVTNSGAFAPGMRMAPITTS
ASLILASMLNELDIRV
>orf01316
(SEQ ID NO: 224)
MLIGIPKEIKNNENRVALTPAGVHSLVSRGHRVLIETNAGLGSGFTDADYQKQGAEIVAT
AGEAWAAELVVKVKEPLSSEYGYLRDDLLLFTYLHMAAAPELADAMLAAKTTGIAYETVR
DNQGQLPLLVPMSEVAGRMAV
>orf01334
(SEQ ID NO: 225)
LIRILGNSFISIDKAHEQAEEYGHSFEREMGFLAVHGLFTY
>orf01383
(SEQ ID NO: 226)
VILFFIRFRVSWLTYFIMSLIFIRFTILVCLIFTNMVASVTKAIILMADVRLDVRHST
>orf01387
(SEQ ID NO: 227)
MIAMRSYITLICNLNNNLFCLNSFFLTNLVWSQIFSLLSVFITVYI
>orf01388
(SEQ ID NO: 228)
MFLFLAIDFIFYSYIFCMSLIFKVNIILSIYLNNISSLNLTDDILIFRLIVGGFH
>orf01390
(SEQ ID NO: 229)
VIPRGDHNHYIKVQTKGYEAALKNKIPSLQSNYQPGTFDEKAVLAKVDQLLADSRSIYKD
KPIEQRQIELALGQFTESLKKIKVS
>orf01419
(SEQ ID NO: 230)
MARLEPAKIAKIVLGILLYIIDLIKSSFVLPIPKAAKKSLILISFVPSFNDKNIVIRRPR
QITKIMPRFICFLFRIFACIS
>orf01436
(SEQ ID NO: 231)
MELSAIYHRPESEYAYLYKDKKLHIRIRTKKGDIESINLHYGDPFIFMEEFYQDTKEMVK
ITSGTLFDHWQVEVSVDFARIQYLFELRDTEGQNILYGDKGCVENSLENLHAIGNGFKLP
YLHEIDACKVPDWVSNTVWYQIFPERFANGNALLNPEGTLDWDSSVTPKSDDFFGGDLQG
IIDHMDYLQDLGITGLYLCPIFESTSNHKYNTTDYFEIDRHFGDKETFRELVDQAHHRGM
KVMLDAVFNHIGSQSLQWKNVVKNGEQSAYKDWFHIQQFPVTTEKLVNKRDLPYHVFGFE
DYMPKLNTANPEVKNYLLKVATYWIEEFNIDAWRLDVANEIDHQFWKDFRKAVLAKNPDL
YILGEVWHTSQPWLNGDEFHAVMNYPLSDSIKDYFLRGIKKTDQFIDEINGEFMYYKQQI
SEVMFNLLDSHDTERILWTANEDVQLVKSALAFLFLQKGTPCIYYGTELALTGGPDPDCR
RCMPWERVSSDNDMLNFMKRLIKIRKYASVIISHGKYSLQEIKSDLVALEWKYEGRILKA
IFNQSTEDYLLEKEAVALASNCQELENQLVISPDGFVIF
>orf01442
(SEQ ID NO: 232)
MGQEIKLIRKQFRSTRQEEKQIKEMMREQKVDSFSEFLRQNLLKKNYQDRIFESWFSLWQ
SQKFEQISRDVYEVLVVARENHQVTQEHVSILLTCVQELIAEVNQVQPLSREFREKYMG
>orf01443
(SEQ ID NO: 233)
MVYRYRTNLKKVFLTDPELHQLNERIAKSNCQNFSVYARKVLLNPNMSFVTINTDTYDQL
VFELRRIGNNINQIARAINQSHLISQDQLQELSKGVGELIKEVDKEFQVEVKRLKEFHGS
Y
>orf01444
(SEQ ID NO: 234)
MVVTKHFATHGKKYRRRLIKYILNLDKTDNLKLVSDFGMSNYLDFPSHAEMVEMYNVNFT
NNDKLYESRNDRQEKHQQTIHAHHIIQSFSPEDNLTPEEINRIGYETMMELTGGRFKFIV
ATHTDKDHVHNHILINAIDRNSDKKLIWNYALERNLRMISDRISKMTGAKIIEKRYSYRD
YKKYKESSHKFELKQRLYFLLQQSKSFDDFLEKAKQLHVQIDFSQKHSRFLMTDRTMIKP
IRGRQLSKRDLYDEEFFRTHFAKQEIESRLEFLLNRVNSLEDLITKAKELNLTIDLKQKN
VTFILEENNQKISLGHQKISDKKLYDVKFFQDYFKNKEVVASEGLENLQEQYHAFQEERD
KDKVSTEEIEEAFKTFKEK
>orf01446
(SEQ ID NO: 235)
VELAENQIEKLVDKGVYIKVSFGVKQSGLIFIPNYQLDIMEEENHKKYKVYIRETSSYFV
YNKENMDNNCFIKGRTLIRQLSNDSQKLPYRRPTLKSLQEKISEINLMIELSNTNKQYQE
IKDELVLEIAEIDMKLEETQEKIATLNKMAEVLINLKSEDHETRKLARYDFSKLNLTEST
SLENVNEEIRVLQENLDYYLYEFEKRAIRLEIFVSTLNMEKDVFVIDKF
>orf01447
(SEQ ID NO: 236)
MAIIKKIVVLYGGLSEEREVSENSAKEISKSLLTLGYDVISIDLSQDCSYEIGEIEKSER
GLNKQKVEIGSGIIDVCRKVDIVFLATHGGIGENGKLQAIFDVEKIDYTGNSFLSTAISM
DKKLSKIVASSVGIKCASNLMVDRIQANDFPIVIKPIRSGSSKGIKIFQNKKQFDIYYKE
HPELGSVFVEKYIKGREFSVGILGETVLPVIEIKVKNGFYDYNNKYTVGAAEEVVPAKIS
EKLTHTLQKSAYKIHKALGFNVYSRTDFIVDEKGDVYFIESNSLPGMTKTSLLPQEAKAA
GIDFPNLCERIIELSREIRSQ
>orf01449
(SEQ ID NO: 237)
MKIINGICRYIFDSKGFATIEVEIFLDSGDTGIGAAPRGSTTGHYDIQYNEYYPRGNNFS
PIPDGNIEFFNENILPRIINREVEDIEDITELDKHLFDIPEIENYGNVAIACSYAVWEAF
SKNKKSPLWKLFFEPGSASKGKVKHLVNIIDGKPDSLLAGFEFLLVSEKEITFQSLLEIS
NIKNELMIKFKNQGFYTSISNQGALIINTDDFYIILDSLLETLKLYKNRYDIGLDLAMTD
RYDSSLGIYKVPWCVSQQQTVTEIMDTYCDWGVKYPLVYLEDPFSDEDLDSWRKFQLIKP
LKLQVFGDDFYATNLERISQFKDCADGIVIKPNQVGSVSKTLEVMEYAEKSGISMAFSQR
TAETENNIISHLAMSVTSSYLKAGGLDRLDRIAKYNEVLRNG
>orf01450
(SEQ ID NO: 238)
MDNGKISTDGALVNNKNIEVNISSASIRYGISVFEAPKMFLLGSDIYIFRFQDYFNRLKT
SCKFLNIELPLDYNKLLYDIKKFIEFVPWQESYALRINVFCPYESELLGEVECALTLSYL
DIGIRSKSGVSSKVIKRSNLIRTSNNNLYMIKSPSHYINARKELYSDIEFDDILYVNEKE
NICELSRSNIFLIKDRTVYTPDLGSGILDGITRKLIIDLCQEHNILIEIKELNYSKLSDF
DSAFCVGTTNGITPIRNIDKNIHFDTNNLLLAEIVNYYKEVFSKKGVEKYKEWFVKL
>orf01451
(SEQ ID NO: 239)
MIKDVNYFNERAQIIRRTINDMIFGAESGHFGASLSSVDFINVIYENYVFPENAEFILSK
GHAAPALYAKLIESGVLDKDFIYGFREYRSLLTGHPNHRIPTLKFGLGSLGQGPSIGVGM
AWVNKRKKSDKKIFVMLGDGELNEGQVWEAFYTCRNLNLQNLVFIIDRNFLQLDGKCEDV
ANFPNLAQKISSFLGTNPIEVNGNSYDEILNVLDNIDYSQTNVIISNTTKGKGIEFMEGK
TEFHSYNILSSEKEVLYKRAMECLGGDKMA
>orf01452
(SEQ ID NO: 240)
MRKTFIDELINKNIEEQNIVVLTGDVGRSTYASKFKEIFPENYLNLGICEANIVGISAGI
AGTLEFVPFVMLFSKHLILRALEQINDSILMNKKKVILVGGYSGYSASKEGETHQLLNDI
SILSSFPDISIYCPYDQSSIQTAINESINNDYSSYIRINKNKILNDVVSRYISQGNKSII
ISMGYLGSLLSKKYMEDSDIREFADFILVSKIKPIDWEYWENFLRKYETVYIIEENTLTG
GLGEQFKNYFFGLGINIISFGIKPHFGETGDYETLLTNEGLSPDKIFEKIRRINHVQSSE
KSIWR
>orf01453
(SEQ ID NO: 241)
MYNLVKRVFGDDNFVKSDGIYLYTDDNKEIIDSCSNSMNVNLGYGVLEIEKVIHEQIRKI
NFMHTGKGTTYESLMLANRLHDIIKPYGNYKVYFATSGSDCIEAALRISVLYQQKNKRNQ
ESNTRFATFEGSYHGSTLGALSVSGHRKFQKLYNGYIGNCLTIPTRWNLEWEMDFTDITA
FVLDSMITNPIGSEMIDRDYLNYLVQICKESGVITIIDEIATSIGRLGCFFGFEDSGISP
DIVCISKGLGVGYANIGAVIVKSNIIDSINSADILGHTYNASPIDCKIAMTVLDYIEEHG
IFEHVNNLSNYIEYRLKVLKNKLPCISKVSGKGFMWSIHFRNNVNASKVFKQCYNNGLLL
LYLEYEEYNHMTFCPPLITSKNQIDSMLDILEKSITEVLHGY
>orf01455
(SEQ ID NO: 242)
MDIKKLGFIIITNETFAFNLVEEVVEKLSILDVNRAIIKLLPKVDETTLIKHYREHLINW
NGKEGKSQVPSLGWPAVRNRFSSSVVLILLEGNKQSLSDEILQIKGNTYPERCRQNQIRI
KGFNPTYNLMHSSDSAEEALKEAELYFSKKELESFFCGEIGITFEEILNFILELDSIQKG
GIRSNSDLENKVNKMCYWKQRIFDLFSSKTKEESRKISEELNFIKSNRSPEDVILYLENE
SILWSKLERDLYLSHLIIEEISGE
>orf01456
(SEQ ID NO: 243)
MVKIYEETLRDGIQSSELSMLNTEDKKKVIKNFDNAGIEGCCIGFINSSKKENDEINELF
QFIITNKLKIVPAVLCRLLIEDFKEIKNIVQCNLFNQLKVYTYIAVSPIRMKVENWSEEI
IIEKIIDFLNYCQMENAKITIAFEDASRADKSFLKKLIEIINNYPLVKSVVIADTVGTCN
YNSTRDLVYFFRKNLFLSKTIEWHGHNDLGLAVSNALSAIESGADIVHTCTLGIGERCGN
TSTEQLIINLIVSECGRRATYKLRYLYDVAKILENKSQFPISPKTPCFGMDSFFTCAGTH
ASSLYKSYLKNDNNFSIIFSPYDSNIFGREVTVGINSQSGRSSIEYISRKYGLELSQENI
TSILGLVKQNDLFFREEEFVDYVKQKRVERLDYK
>orf01457
(SEQ ID NO: 244)
MLNKKEWKDLTISKSENDSIISCLYNWGFELPKSKDYTESLTWYGYNNVSYKYCEKECLT
LGELSLLFPQLNDLFWENQKDNIEGRRNFYKNCKNLLGKFNIYSVRDILEISDRDLQFAL
TNRVGSKEFENSIVSLMYINKLSDDNKAENTLEKKLYFSINNEDSIIPYYENTLGMTAGN
YYFTASHRTFFSSTFPDFFKIDVPYKISNSVRNLTRNELRIRASEIIKSELANSENPILK
IFDDYAYVRIGKRNMVLRNKFFNGFIAPLFAFFQQRIFDNGKSFFTHFYDLRKNTSQNIP
DYLLLNILFPLIDCFEFFLNVSIKYKRLIFPYDFHMQNIMISIYDNQIGFIFQDFDMSKE
LTVTSFYEQLDEFFEKFVVTNILESINELKLDEKKYIMREMKKIINTKIIIKAESYFGFP
SPSEVIFPDFMKQYLRENQNVKERTIKYRSYLR
>orf01458
(SEQ ID NO: 245)
LFIDILKKKKMKIIEAHDALSAYIIDQTKYSADKGDIFEYDGIWISSLCDSIIRGKPDME
VVNITDRLQTIDDILCVTEKHIIVDIDSGGTLAQTASLIEKITLRKIAGIVIEDKIGQKY
NSLFGEKNTQLQDSTESFERKIRVAIKSRKNSKTAIIARIESLVLGKSLEDLLYRGNCYI
KSGAEALVIHALNSRLDDLYQALKYFKRYFPEIPLIVIPTDFPYVCAEELFESGADLIIY
ANHLLRSIIKPMEYIAKSILIDGYSNGVENKLLPISEILNYIPLLEEIDEK
>orf01459
(SEQ ID NO: 246)
MKSKDLISSLKLNGVTRFFGVPDTFLYPITSQLANDELIIVPNEGNAVSMAFGYSITTSR
MPVIFLQNSGLGNILDPVQSLVGQAVYNHPMLYIIGFRGGTDDAPQHSECGKVTKKLLEI
SQFDIYEKDYFTNALDTDIRRIIDNIKKKNKSAAILVDKEFFSDIVNIKNYQISDYNDIL
NKICAVLEKEKDSIVLTSTGYITRHMENVKDTYKKNFVHIPMPGSLGQTISFGAGICMGT
SINNKKKKIYIIDGDGSLFMHMGSLALFDYYNLDVTYILLNNYKHLSVGGENTLASSCNF
FKLAESMNFDNIYSSDNLEVVDFEEKLNQQGKNFIEIICSNEVTYSLLERMDFNFEEIKQ
FNMEN
>orf01460
(SEQ ID NO: 247)
MPDRYVEYSQNDYDNIMKLDTLFISQLDSKYKVEYHKLPSLISGEVLKRCGYFSTMPNQL
SKVDIIDVSQLESLGNNRELEEIKYSSSENYFLTPAACLHFYPMLEHKEVKECIYSSLVD
VFRYENGNFTMGTRQWEFTVREFLAIGNPKFVEEFLEDLKEKFLTIALRFDSTAKIQNAC
DNFYPTNLNKVKQKFQKYNNLKFELIVHISEKEVSVASFNYHNNHFSKEFNEDSNDTIVT
GCVGLGIDRWISLIKESEKDYKL
>orf01461
(SEQ ID NO: 248)
MRKQIISLFHAYLNENTQDWVEIDENFLLYQHLDMFYYYLCKKNNIEPPLMEKFEVRKKV
IESRNRQYIKVARDLNAIFEKQSIQVAFLKGIQTSEKYYEEPWIRYYSDLDILVAREMIP
GVEKLFYQLGYVFGHLKDNGEIHHATREEILYQKLFTHEIYNLVKKENDNVFINVDINFL
FSWKGLSDSEIEFNDIKNDIIYDSKIKINTLDKVMNFIHICCHLYNEARYFALNRSFLGG
DPREIQLSRVFEIALILKDLKQEEFNSVVYSSRKLNCDNKVFASIGVTKQLLELNLSILD
NYTEELKVKDEFNSYIDKDQKVKYWPISIEDRVFDLKLKVKTCDKIFIN
>orf01462
(SEQ ID NO: 249)
LKYDSEIKNVIKDYIDFEFDINEIDNNVALTDYGVDSLKYISIILALEDYFKIEIPDNYL
VFSKSNTIKKLNSIIEELL
>orf01463
(SEQ ID NO: 250)
MKYINSSLKPVDNYYSLEEVTCFDRLLGIFLNSINNSYCDLFYMINNFYRCYKVDDSKNE
YDFEREMHILRNFFCIESEKINFSDEYVLTEFIVKNINKYGSVFVPINLKEIYYSAYYKE
QDWPHLFLINGYDKEKELFYVIDATQIYSDILTEQNFCITFEILERAYKSYFHQTILNKE
KEYIFVVTTVVNELTETEIFHETFKYLFNQSSISSRELEIVYKILTNRDFTLLANLKNIT
KKKKLFFTIFFEKLRVYELISNKELLYLSRTVETILEEWTIFINRCIKNILKNDTKLVNY
DFFVLEEKKIFDFFSKQASRYKERLFEIISSNSNRYNEVFECIQNSGKIITITEDNSRKF
RFSFIGDKIYNSWFNDDSPKVRINQDLNYLIVKINVIHKEKDSKFVAGLYCFIDDNLYYF
GLDSNYFINLDLMGKTPEIFRKRLETSEVYLKISRQEDSCKFSYSVDGITYFYATSLDIR
SCHFSCGIGCKTYSKPTPLCIDFEDLLIG
>orf01464
(SEQ ID NO: 251)
MAMIEVSCLRKDFVKIIKEPGLKGAIRSFIHPEKQIFEAVKDLSFEVPKGQILGFIGANG
AGKSTTIKMLTGILKPTSGFCRINGKIPQENRQDYVKDIGVVFGQRTQLWWDLALQETYS
VLKEIYDVPDAVFQKRMDFLNDVLDLKEFIKDPVRTLSLGQRMRADIAASLLHNPKVLFL
DEPTIGLDVSVKDNIRRAITQINQEEETTILLTTHDLSDIEQLCDRIFMIDKGQEIFDGT
VNQLKETFGKMKTLTFELRPGQNHVVSQFVGISDIHVTRKELLLNIQYDSSRYQTADIIQ
KTLSDFAIRDLKMTDVNIEDIIRRFYRKEL
>orf01466
(SEQ ID NO: 252)
MVKLWKRYKLFISAGMQELITYRVNFFLYRIGDVMGAFVAFYLWRAVFSSSHQSLIRGFS
LSDMTFYIIMSFVTNLLTKSDSSFMIGEEVKDGSIIMRLLRPVHFAASYLFTEIGFRWLV
FVSVGLPFLIIIIGLKLLSGQPILQISLMTLTYLLSLILAFLINFFFNICFGFSAFVFKN
LWGSNLLKNSLVAFMSGSLIPLSFFPKIIADILYFLPFSSLIYTPVMIIVGKYNISQMIQ
AVLLQLFWLLVMIALSQIIWKRVQSHITIQGG
>orf01467
(SEQ ID NO: 253)
LLVGISLLSATVTSLTWTWTKVFIFLISIPFATLIYTSLKIATASIAFWTKQSGAVIYIF
YMFNDFAKYPVVIYNSFLRWLISFIIPFAFTAYYPASYFLKDKDGLFNIGGLILISLIFF
TISLKLWNKDLDAYESSGS
>orf01468
(SEQ ID NO: 254)
MDEVFKFYCTNIIRVIFIKWLFCLKSMNHTNLTLVTTTFKQFNSTSLGNHHAMV
>orf01469
(SEQ ID NO: 255)
MQAFDGSTEFIHNGKGEKDSSKYQINGAGRCEVPVYVPKTDWDWIIYPQGIYD
>orf01471
(SEQ ID NO: 256)
MRVKRDYPNYKIYITENGLGYKDEFVDNTVYDDGRIDYDYVKKHLEVI
>orf01472
(SEQ ID NO: 257)
MEWIINIIRGIRYIGREAGVTFVEPSQTSIKSFDITIL
>orf01473
(SEQ ID NO: 258)
VRHYKDYISQRSDWELAGIYADEGISGTQVGKRQDFQRLINDCVNGEIDYIVTKAIARFA
RNTLDTLKYVRMLNDMQIGVYFEEENIDILTMDGELLLTILSSVAQQEVENTSAHVKKGL
KMKMERGELVGFQGCLGYDYDVETKQISINKKESKIVRYIFERYLEGIGGKVIARELDEL
GYKSPRGLEHWNDTTVLGIIKNEKYKGDILIGKTFTVDPISKRRLSNFGEEDKYYIKDNH
EPIISK
>orf01474
(SEQ ID NO: 259)
MYAFSSMLECGFCGSILSRRSCHCRSDYRKVVWHCVTSIKKGKKFCKHSKGLEKLAIEGA
FMEAYRQLYHSNENLMTDLLETIESELNDNSLNKELKRITNKLRTLLKKEENLVNLRLEG
KISDTIYDEKYNEISSEKEFLAEEKVNIETTLKSEIDVKKRLTEFKHLLSSQKMLTEFDR
AVFESIVEKIIVGGVNSNGEIDPAMLTIIFKTGETQNKDGKQFKSKRKNAKLETDKLCPQ
NSDEDKKLYSQGTDNTRGVCSVAGSILVSQ
>orf01475
(SEQ ID NO: 260)
MGGNPPIKKYSIVDKIVLSTKIKRIIIFTVFRENWEPYMKKYTEVFQSQFPNLNIDYLLL
DTEQIDLDSYLDADLIIIGGGNTEKYIATYVNQEFKNYIDHMLNKGAKVIGFSAGALLLG
EKVYVSPNDNSDHQIKIKDGLGLFSQFLISVYYDSWNDKANKDRAEELVNVPIIPLNDHS
CLVLDKLGNIIEKID
>orf01476
(SEQ ID NO: 261)
MDFSSKIAINTGWSDDKKYCVTDQNQQKYFLRVSDKEKLDSKKFEFDMMGKVASLGVPMC
KPISIELCDDEVHSLHEWIDGRDAIDSILTYSENQQYTYGVEAGKILRKIHTIPATEVCE
DWEIFFNLKIDDKISNEMIW
>orf01514
(SEQ ID NO: 262)
LCSALKNSYDIELIKVLSNKAHLYLPIETVTPQTVSTS
>orf01537
(SEQ ID NO: 263)
LVKNPFIEIERIERTWLTAHLYRKFDKYFHKTRPPIKVFEHLIGGLFIMKTFT
>orf01538
(SEQ ID NO: 264)
MIKIYFTKFSENHNPFCKIFEIIFTSLIFQSILNKNKKNPLHQGETNVV
>orf01545
(SEQ ID NO: 265)
MSQVKGLCVLDVDGTLILEEVIDLLGREAGHEAEISQITSRAMRGELVFESSLRKRVSLL
EGLPILVFDNVFNSIHLSLNVPEFISILQKNGILVGLVSGGFTPIVGEISKIPWYCLFHC
QPA
>orf01546
(SEQ ID NO: 266)
MLKSAELGIAFCSKEMLKKEIPHHVDKRDFLEVLPLIDCLE
>orf01551
(SEQ ID NO: 267)
MFGNWFFKAFVCSLERLAQDRTMNWFSCIGNKNTVAFVPILIGCFA
>orf01565
(SEQ ID NO: 268)
MEKYFGEKQERFSFRKLSVGLVSATISSLFFMSVLASSSVDAQETAGVHYKYVADSELSS
EEKKQLVYDIPTYVENDDETYYLVYKLNSQNQLAELPNTGSKNERQALVAGASLAALGIL
IFAVSKKKVKNKTVLHLVLVAGIGNGVLVSVHALENHLLLNYNTDYELTSGEKLPLPKEI
SGYTYIGYIKEGKTTSDFEVSNQEKSAATPTKQQKVDYNVTPNFVDHPSTVQAIQEQTPV
SSTKPTEVQVVEKPFSTKLINPRKEEKQSSDSQEQLAEHKNLETKKEEKISPKEKTGVNT
LNPQDEVLSGQLNKPELLYREETIETKIDFQEEIQENPDLAEGTVRVNQEGKLGKKVEIV
RIFSVNKEEVSREIVSTSTTAPSPRIVEKGTKKTQVIKEQPETGVEHKDVQSGAIVEPAI
QPELPEAVVSDKGVPEVQPALSEAVVTDKGETEVQPESSDTVVSDKGEPKQVAPLPEYKG
NIEQVKPETPVEKTKEQGPEKTEEVPVKPTEETPVNPNEGTTEGTSIQGAENPVQPAEES
TTNSEKVSPDTSSENTGEVSNKPSDSKPPVEESNQPENSGNTTSENGQTEPEPSNGNSTE
NVSTKSNTSNSNGNEEIKQENELDPDKKVEDPEKTLELRNVSDLELYSLSNGTYKQHISL
EQVPSNPNSYFVKVKSSSFKDVYLPVASISEERKNDKILYKITAKVEKLQQEIESRYKDN
FTFYLAKKGTEETTNFTSFSNLVKAINQNLSGTYHLGASLNANEVELSTDDKSYIKGTFT
GQLIGEKDGKHYAIYNLKKPLFESLRGATIEKLSLKNVSISGKDDIGSLANEAQNNTKIK
QVHVDGVLAGERGIGGLLAKADQSSITESSFKGRIVNTYETTASYNIGGLVGHLTGSKAS
LTKSKATVVISSNTNSSDQTVGGIAGLVDKDAHIQNSYSEGDINNSQRFGKVAGIAGNLW
DRESNSENHAGRLTNVLSDVNVTNGNAISGYHYNGMKITDAFSNKANKVFNVTLEKDEVV
SKESFEERGTMLDASQIASKKAEINLLTPPIVKPLSTSGKKDSDFSKIAHYQANRALVYK
NIEKLLPFYNKATIVKYGNLVKENSILYQKELLSAVMMKDDQVITDIISNKQTANKLLLH
YKDHSSEKFDLRYQADFAKLAEYSLGDTGLLYTPNQFLYDQDSIINQVLPELQQVAYDSE
AIRKTLGISPEVKQTELYMEDQFTKTKQDLANSLKKLLSADAGLAGDNPVTRGYLVDKIK
NNKEALLLGLTYLERWYNFSYGQVNVKNLVMYHLDFFGKGNTSPLDTLIELGKSGFNNLL
AKNNVDTYAISLASHHGTTDLFSTLENYRKVFLPDKTNNDWFKSQTKAYIVEEKSNIEEV
KTKQGLVGTKYSIGVYDRITSDSWKYRNMVLPLLTLPERSVFVISTISSLGFGAYDRYRN
KEHQANGDLNSFVEKSAHETAERQRDHYDYWYRILDEKGREKLYRNILLYDAYKFGTDHT
EGKATEVANFDNPNPAMKHFFGPVGNKVGHNGHGAYATGDAVYYMGYRMLDKDGAITYTH
EMTHDSDQDIYLGGYGRRSGLGPEFFAKGLLQAPDQPSDATITINSILKHKTSDSTEGQR
LQVLDPTTRFNDAADLQNYVHNMFDVVYMLEYLEGQSIVKQLDAYQKMTALRKIENKYVK
DPADGNDVYATNVVKNLTEDEAKKLTSFDSLIDNNILSAREYKAGTYERNGYFTIKLFAP
IFSALSSEKGTPGDLMGRRIAYELLAAKGFKDGMVPYISNQYEEDAKQQGQTINLYGKER
GLVTDELVLKKVFDGKYKTWAEFKTAMYQERVDQFGNLKQVTFKDPTKRWPSYGTKTINN
VDELQKLMDEAVLQDATGTRWSNYNPEIDSAVHKLKRAIFKAYLAQTNDFRSSIFENKK
>orf01580
(SEQ ID NO: 269)
VLGGRANSVTSCTTNSHWNLTFTTKHVTCFSSLVDDIVHGNNREVHEGHIDDWTKSCHGC
SCCSSRDGSFRNRTVTDTFWTKFFKHSNRSTEVSSEDTDVFSHQEHIFIATHFLRHSKDN
GVTEGHCFCFHFISFSLVCVNIFKG
>orf01581
(SEQ ID NO: 270)
MDMFYIGHFLDIRRDTVTVVNAIENDWQVPDRSHVHCFVENTFIGRTISKEADNDFTGIL
HLLTEGCTDSDPHTTTYDTIGTKVPSIKVSDMHRSTFPFTGSSVFTKDFSHHSVEVNPFS
NSLPVSTVV
>orf01602
(SEQ ID NO: 271)
MKINKKYLVGSAAALILSVCSYELGLYQARTVKENNRVSYIDGKQATQKTENLTPDEVSK
REGINAEQIVIKITDQGYVTSHGDHYHYYNGKVPYDAIFSEELLMKDPNYKLKDEDIVNE
VKGGYVIKVDGKYYVYLKDAAHADNVRTKEEINRQKQEHSQHREGGTSTNDGAVAFARSQ
GRYTTDDGYIFNASDIIEDTGDAYIVPHGDHYHYIPKNELSASELAAAEAFLSGRENLSN
LRTYRRQNSDNTPRTNWVPSVSNPGTTNTNTSNNSNTNSQASQSNDIDSLLKQLYKLPLS
QRHVESDGLIFDPAQITSRTARGVAVPHGNHYHFIPYEQMSELEKRIARIIPLRYRSNHW
VPDSRPEQPSPQSTPEPSPSLQPAPNPQPAPSNPIDEKLVKEAVRKVGDGYVFEENGVSR
YIPAKDLSAETAAGIDSKLAKQESLSHKLGAKKTDLPSSDREFYNKAYDLLARIHQDLLD
NKGRQVDFEALDNLLERLKDVSSDKVKLVDDILAFLAPIRHPERLGKPNAQITYTDDEIQ
VAKLAGKYTTEDGYIFDPRDITSDEGDAYVTPHMTHSHWIKKDSLSEAERAAAQAYAKEK
GLTPPSTDHQDSGNTEAKGAEAIYNRVKAAKKVPLDRMPYNLQYTVEVKNGSLIIPHYDH
YHNIKFEWFDEGLYEAPKGYTLEDLLATVKYYVEHPNERPHSDNGFGNASDHVQRNKNGQ
ADTNQTEKPQTEKPEEETPREEKPQSEKPESPKPTEEPEESPEESEEPQVETEKVEEKLR
EAEDLLGKIQDPIIKSNAKETLTGLKNNLLFGTQDNNTIMAEAEKLLALLKESK
>orf01625
(SEQ ID NO: 272)
MDESFDDIAHEQFTSNLTTKTDNVGVQLFFSIKGCCHITNQGRANTWNFIYSVVDTNTST
TDTYSKISLAASYSFPYFFTKDWVVSPCMVICTKVNDFISF
>orf01629
(SEQ ID NO: 273)
MLDFQDRSPWLEGQKEIDLSYDLFSTDAVTLDELQSRTIALRSLKHDKGLKVHFAEFPNL
IIWSTLNKGPFITFEPWSGLSTFLEEGDHLEDKKNVCLLEANQVEELGFEIEVL
>orf01634
(SEQ ID NO: 274)
MKIKEQTRKLAAGCSKHSFEVVDETDEVSNHTYGKATLTWFEEIFEEYKN
>orf01643
(SEQ ID NO: 275)
LIESQVFSSLQVCCLNLCHLKFQHFDTCLVFLLVFLDFQNLLAHFPIGIKTRLIGFFQVP
KSGITKFIQHLDMQLGTH
>orf01644
(SEQ ID NO: 276)
MVMLTMNIYKMLPNSSQNRQINHLTIYTADTTTILQDFPTDDNFIT
>orf01645
(SEQ ID NO: 277)
MTNNICRRTSSQHHIHGINDNRLPCTRFTSQDSHPLFKIEGNSLNNGKVFYRNFK
>orf01656
(SEQ ID NO: 278)
MPHTRDNWQTRFKNSSYHNFFVKGPEILNRTTSTTNNEQIQIVPLISTRNISSNFLRSPF
TLNLGRIKKDVNTWESPADGRDNISNNGSTTAGYYTNSLRKLGQSLLEAFLKQAFFCQFF
LKLFKLNRKRPNPIRLSFFNDDGVATTWFIDLYTPNHIDLHSFFQVKP
>orf01660
(SEQ ID NO: 279)
LAIIRNRTCSLKLINGHLTFWTLHFLTSTRILIELATINLNCRIHRGNLGNRPSQASNRF
INKLFIQGRQNRGFCDHFPTSILSRRGIAQSNFPLIDLTLVLHKLDHACRLANRNRQNTH
HIRIQGSTMTNFLGSQNLTQFKNRIMRGHSCFFF
>orf01667
(SEQ ID NO: 280)
MFALRKPGNIYTRITNPTTAALEGGVEALATASGMTAVTYTILAIAHAGDHVVAASTIYG
GTFNLLKEPLPRYGITTTFVDIDNLEEVEAAIKDNTKLVLIETLGNPLINIPDLEKLAEI
AHKHQIPLVSDNTFATPYLINVFSHGVDIAIHSATKFIGGHGTTIGGIIVDSGSFDWTAS
GKFPQFVDEGPSCHNLSYTRDVGAAAFIIAVRVQLLRDTGAALSPFNAFLLLQRLETLSL
RVERHVQNAETIVDFLVNHPKVEKVNYPKLADSPYHALAEKYLPKGVGSIFTFHVKGGEA
EARKVIDNLEIFSDLANVADAKSLVVHPATTTHGQLSDKDLEAAGVTPNQIRLSIGLENV
EDLIEDLRLALEKI
>orf01668
(SEQ ID NO: 281)
MTRDFKFETLQLHAVQVVAPATKSRAVPIYQTTFFVFDDT
>orf01672
(SEQ ID NO: 282)
MSQKKNNKKKNKRKNLLTNILAGFLILLSLALIFNTQIRNIFIVWNTNKYQVSQVSKEKL
EENQDTEGNFDFDSVKAISSEAVLTSQWDAQKLPVIGGIAIPELEMNLPIFKGLDNVNLF
YGAGTMKREQVMGEGNYSLASHHIFGVDNANKMLFSPLDNAKNGMKIYLTDKNKVYTYEI
REVKRVTPDRVDEVDDRDGVNEITLVTCEDLAATERIIVKGDLKETKDYSQTSNEILTAF
NQPYKQFY
>orf01679
(SEQ ID NO: 283)
MRWNIGCHPNRDTSCSINQKVWKTRWQDQGFPFIGIIVINEINCIFVDITKHFQSNLAHT
CLGITLSGSTISIHGTKIPMTIYKHVTVAPPLSHTDHGFINRGIPVWVIFTHDIPCNTSR
FFMGFVWGHTQFIHSVENATVNRF
>orf01683
(SEQ ID NO: 284)
LKKKWFFADYYDTTIILLALISVILVLLGFAEMIDLDNPPYSIIDLVIWGVFVIDYSWRF
FITKRKWRFILENIFDLLAILPLNAIFTVFRLGRIFRLVKLTKLLKLTRLLRIIGLTGKL
ERKISRFLRTNGLIYILYVNIFIILVGSSILSVVEEKSFSDSLWWALVTVTTVGYGDIVP
VSLLGKWLAVLLMLVGIGTIGMLTSALTNFFVKDNPDEQIKLDKLKDELSS
>orf01693
(SEQ ID NO: 285)
VVDFKQTRQDPHDITIYSWLRQVKSNTGNGSCCVRSNPFQAGNSFIGIWKLATKVSHNLL
GCSLHIANSRIITQALPSFQ
>orf01698
(SEQ ID NO: 286)
LINSQLIPLVQVVVNQGRKGIVGSCNSMHISSKVEVDVFHWQNLCIPTTSSTTLDPHDWT
KRRFADSNHGFLANLVQGIRKTNGKRRLSFTCRCWVDGSNQDQFTDWIALNCTNFIKAEF
SLVLSVQLQIVVRNTKFLYNINNWLQLNTLCDFNICFHSKFL
>orf01711
(SEQ ID NO: 287)
MLFIIGHLNFPTAGSFIDSTLHRLGNRVCIHDDMAFTVTSSTSNSLDESTFVAKETFLVS
IENSYEAHFRNVNSFTEQVNSDQDIKDTQAQVTDNLRPFQGLDIRVHVLDLDTHFLEVVG
QILCHFLGQSCDKGTLIFFNAGIDFTQEVINLSHSRTDFHLWIQESRWTNDLLNHCLGLF
IFIVTRCR
>orf01712
(SEQ ID NO: 288)
MNVTLKLLPTERTIVQSRRQTETIINQHFFTRTVSIVHALDLPYGHMTLVNHNQEIIWEE
VEKRIRRLSFAPSIHVARIIFNPIGIAHLTQHFDIILCPLFQTLGFKQFTFLFKDS
>orf01713
(SEQ ID NO: 289)
MIHFSQHLTCQSLNFTNTVNFVSKKFYSKGMFISGSWENLYHIPTNAKSSALEINIIAFK
LNIDQVIQEFITRNL
>orf01714
(SEQ ID NO: 290)
VAKLVNLVIDRTILLNIGIARRDIGLWLVIIIVGYEILNCIFREKFLKLPIELTSQSFIV
GNNQSWFIDFRNDLTHSIRLPCSSRPHQNLSFFSPLNVIHQLLDSLGLIS
>orf01734
(SEQ ID NO: 291)
MNITQTDFLAVNLVFAISTTIDMAFHPDFLTCILDKSVMIIQSHNYRSIIERFATFGSSK
DDIRHLAPTETLDTRLPQSPTQTFCNIGLSRSIGSNNCRHTLVKNDLGLISKRLEPLNFD
FL
>orf01736
(SEQ ID NO: 292)
MGFIVCNHLKLACFNLRNHDLIDKFLDLGHILIQKKGTKKGFKGITKNGVTIATTRFFFP
FTQLDKLVKLAITRKTS
>orf01748
(SEQ ID NO: 293)
LFTCFSKLDNKTASTTYISHKFFTAIPVCFEFFKGFWFPRKDTTKKNIFIPMFLVECFNF
WVELR
>orf01753
(SEQ ID NO: 294)
VVRELTGEIYFGDHILEERKARDINDYSYEEVERIIRKAFEIARNRRKIVTSIDKQNVLA
TSKLWRKVAEEVAQDFSDVTLEHQLVDSAAMLMITNPAKFDVIVTENLFGDILSDESSVL
SGTLGVMPSASHSENGPSLYEPIHGSAPDIAGQGIANPISMILSVVMMLRDSFGRYEDTE
RIKRAVETSLAAGILTRDIGGQASTKEMMEAIIARL
>orf01754
(SEQ ID NO: 295)
MAKKIVALVGDGIGPEIMEAGLEVLEALAEKTGFDYEIDRRPFGGADIDAAGPPLPDETL
KASREADAILLVAIGSPQYDGVAVRPEQGLMALRKNSIFTLIFVL
>orf01758
(SEQ ID NO: 296)
LANIESHCNFFQSSIFSSLPNTIDSLFNTSCTILDSSKAICHCHSEVIMTVRRIDDLTIR
LDILNQVFEDGTTFLWCGKSYIF
>orf01768
(SEQ ID NO: 297)
MPRNRFSFTVRVTREKNFISFFSFFFQVIDKRAFSSDIDILRFIIIFNIDGHTGFLQITD
MPDTG
>orf01772
(SEQ ID NO: 298)
MKIKAQTRKLATGCSKHCFEVVDKTDEVSSKYCFEVADGS
>orf01781
(SEQ ID NO: 299)
VHAHTDKLCNGCNRIFNSIISHHTIFRERNKLSHKAIKSTRQEMGPCHVVFIEFFITLHR
RLIGNHDNFLTNLVGSGRVRNDGST
>orf01782
(SEQ ID NO: 300)
VNHCHWKLFIQNLGITESLIVTLIRMTDSHVVGTDKDMILLVNSLFLIFDIDKLRLS
>orf01784
(SEQ ID NO: 301)
VGNNDILWSKRTISINGFNDFLNTCIAVSTTLCNDDTFLIKRKIFIYKIFCMRNPVSMNT
NYNFFNTWLQDKFFNCMNQNRSIT
>orf01794
(SEQ ID NO: 302)
LVAPVASSTRFFKNNDSLTSWNNGFIIITINTIISYQRISKGQDLSIIRLVCNGFLVAGH
PCIKDDFACYINICSEGLAFKNCAIF
>orf01796
(SEQ ID NO: 303)
VVCYFYITIDWSWVHEDCCFFQTIVTFLSQAMLGMVVFF
>orf01797
(SEQ ID NO: 304)
MAFVLHTEKHHDINLINDFINGYKLSIVCKLLTSPFLRSREKEFSSQAFQNLHIGFGNA
>orf01798
(SEQ ID NO: 305)
VVQVTCNSNFKTLKVAKFLINGHQIKQALARVLARTISTIDDGSRNRWTSNQFSIVVDLW
MANHTDIHS
>orf01799
(SEQ ID NO: 306)
MCPCRILKEEIGNNRMVFIGNLGSIFKLNSSLDQFHYLINSEVFHGHHMVQCLLIF
>orf01824
(SEQ ID NO: 307)
VQFHLIIFQNLFCSLDIVIDSLTTNTKLLSYLSKTVIISVVKLYIIHLLICQKRRIKFKE
RIHTIGFFDSKLTIXXXFHSLIN
>orf01826
(SEQ ID NO: 308)
MHFHIIKLVNHFQLLIKLNRISHPNLHIKSSFLSLVLLFYQKEQDFAIMVI
>orf01840
(SEQ ID NO: 309)
MTGKKGFLFLNCHICMVTTTTCFLKERVESELLIFFYISPNRCLITV
>orf01843
(SEQ ID NO: 310)
LNRSILDNITLKHEVTSQKIEEVCKAVQIYDEIMAMPMKFNTIISEMGSNISGGQRQRIA
LARALINNPSIVILDEATSALDTINEERITKYIKSQGCTQIIVAHRLSTIKDADIIVVMK
GGKIVESGNHKYLMDLGGEYYSLYTKRK
>orf01845
(SEQ ID NO: 311)
LFKGGVTISRTPLSSEDTVMIDATEVKINRPKKKTISE
>orf01848
(SEQ ID NO: 312)
MAGKKDFLFLNCHICMVTTTTCFLKERVESELLIFFYILLNRCLITV
>orf01850
(SEQ ID NO: 313)
MYQDEAGFGRISKLGSCWSPIGVGPHVHSHYIREFHYCYGAVDAHTGESFFLIAGGCNTE
WMNSFLEELSQAYPDDYLLLVMDNAIWHKSSTLKIPTNIGFTFIPPYTPEMNPLNKCGKR
FVNVDLRIRPFELWKMS
>orf01852
(SEQ ID NO: 314)
LLQSPYAIDTINLKKDFLEKPIDIEKFKAFLEKEEIPLAIAWQGDSLHFYTKDRSILDNH
LDHLLEKMVNDPEKLSDFSMDKSLDDTIDEAKSQITFK
>orf01853
(SEQ ID NO: 315)
MKVVNLYDLKQMGNKGGCTIQLIHHFPFGMGLGHLKKDYIEFKRVGIFDGKAVEVTLREP
YSRDILQVVKSIKQRQKLIAYRYKEGKLLFVKKEV
>orf01876
(SEQ ID NO: 316)
MKPSGQEFPHPIFYSLFCFYTDTLGINSQVMQFSFERLLFQFCLNCWHLVMRSQNHNCRP
STRKVGCIGPIFFGHLLNHRKFSYQVLTIALMEEISLDCLPSGHHVSCQQGSNRYIGDRT
CSNSFLIRQFFRQDTTAVAST
>orf01878
(SEQ ID NO: 317)
LQVWYNLQSDFEQEITLIMWNPFANLVFNQPLISFFADLNLKILGYSYTDRVKTWPDIGT
GCRYNNLHLILLAP
>orf01909
(SEQ ID NO: 318)
LRQNRCYNCFHDHSCSWKSSRITSLHGCLVRFVGFDIHTHKRFIKSRNGFHDPTNNDGLP
ISHTTFKTT
>orf01910
(SEQ ID NO: 319)
LAAFTITSLKAKTKFHPFKGIDRDNSLSQSCIQFSIPLDIGTKTNWNASDDCLHNPTDGI
TITFDLVNIVLDFLFSFLVDNRNFRLGSSLLNFSDCQIFRNIDFLATKDHDMVGNLHIQL
SQETFGYCTNCHPHGGFTS
>orf01911
(SEQ ID NO: 320)
MTWARMSNFPLAFKAVFNVLRRHDVQPFLVVLIDDIHSNRRPCRLPVANARSKDNLVILN
LHTTTTTVATLTASKVLIDILSCQWKSSWNSLNNSC
>orf01913
(SEQ ID NO: 321)
MHDLAITGSRFDGMANSVAKIEVKTNTIVQLIFNHHLALHLTRMFNQGLCMFQNTLNRTI
QSRQESPQFWILNQAILDNFTHPFNQLSFSEGFKNKWINQNPIWLGKGPHHIFSKWCVNT
CLSTDRRINLSCQTSRNLNKVNTPHIGRGYKSSQVPNNATTKSNDSIATSQTLLD
>orf01915
(SEQ ID NO: 322)
MVICHNDYLLRLPEFSQPLTSLGHTTFFNLNIIRMMRNIDSDFHRRVSLSLLVFFC
>orf01920
(SEQ ID NO: 323)
LIEGHLVFADKPAQALVLLRKVGSPKKVSFLTLHLYFLILKIDILKITGF
>orf01951
(SEQ ID NO: 324)
MAVTKSQVFSRQGFDFSILGQDLTRLQDVSNLATIGTRIHKDSTANASWNTTSKLKAS
>orf01952
(SEQ ID NO: 325)
MTEGNASCFNQVSPSFCFNGIAINRNVIELVTQDDKSTNPTITNDDIACIAKNHPRDIFL
VGKFHNASQLKTISWKDQIISLSTYFCITIAMQGFLKTDINSF
>orf01965
(SEQ ID NO: 326)
MRLRDLRRVDFPDPDGPIKAVISLGWKDRETLFKAFFLL
>orf01968
(SEQ ID NO: 327)
LKNHSNVFTHFINVDFWTVDINSTIENLPSYFSNINGIIHAIETA
>orf01969
(SEQ ID NO: 328)
LHINPLNGFIFTIVNMDILSRKGYFFFRKGKDMLLIPVIC
>orf01981
(SEQ ID NO: 329)
MTIHIQVVKTNMVILADRLFQGFILRSTDKFFIKIRLVRSHNLRFNSMDFSTVAVHENKG
RHHMDELLPRFIINSKATVAKKSIVAQGFRFDGNFFRKTRQTNHLNIIFCDNPDQIIVFQ
NGLITNSQFNRLHP
>orf01988
(SEQ ID NO: 330)
LGHSKAEEHETICSHPFDDHTTETIPNQVKGRDMTSSETLPFPSKNQNQGKAKQNP
>orf01991
(SEQ ID NO: 331)
LLLSCRKVIVCFIFSSTWNKNFFNLAFSWNFDNCIRGFFSINSNLFGNMTSLWINIVGPC
RGYIAILSVNCNRIFTTVFCFIFFKTNSRT
>orf01992
(SEQ ID NO: 332)
MVKRRIRRGTREPEKVVVPEQSSIPSYPVSVTSNQGTDVAVEPAKAVAPTTGWKQENGMW
YFYNTDGSMATGWVQVNGSWYYLNSNGSMKVNQWFQVGGKWYYVNTSGELAVNTSIDGYR
VNDNGEWVR
>orf02006
(SEQ ID NO: 333)
MRFIVGRFTSFSLGIEFSPTSKLDDLLFKIAFLMILATWIKARKTKGAT
>orf02010
(SEQ ID NO: 334)
MANDNKSHYLIYRVLGISFEEGENIDLYQNKGRFLYKYAGSFLEEAAVLSFNEKFGTENT
>orf02019
(SEQ ID NO: 335)
LVNCKPLEAYRQLEEAELVGCWVHVRRKFFEATPKQADKSSLGAKGLAYCDQLFALERDW
ETLSADERLQKRQEELQPLMEDFFAWCRRQSVLSGSKLGRAIEYSLKYEETFKTILKDGH
LVLSNNLAERAIKSLVMGRSKRVQWTLLA
>orf02022
(SEQ ID NO: 336)
MFPVETEEITYKRKKSKGKCQALLAQFDSEEVHHQVEESICSDCQGDLKEIGATLQRQEL
VFIPAQLKRIDHIQHAYKCQACSDKNPSDKIVKAPIPKAPL
>orf02023
(SEQ ID NO: 337)
LKIIQQQSATIDSLTNELALLREQVAYLTQKLYGKSSEKSVCPSGQLNLFEEESPSEEDG
DVPS
>orf02024
(SEQ ID NO: 338)
LTIPVKDFKAVFTSTTKEKDLTGERIQFKVGFNQISQ
>orf02037
(SEQ ID NO: 339)
LVCQTIKYWHKFHLHIGRCKLLIGLIPVLNFFIRADIDCLLVLLSLIDRQNGKQFNLCQW
IIASNGLNDSFEIIESLIHRNILSDIICPNQKKNFIYCSTI
>orf02042
(SEQ ID NO: 340)
MIFSCSDSCFSIILLDGDIHENTTFSPLSILFISHRFNSLIGNEVPH
>orf02043
(SEQ ID NO: 341)
MPSKDNIRSPIDHLVIKSFLFFSWFQSILNTHLRHDNGDICFLLCPFNFSLHLIFV
>orf02045
(SEQ ID NO: 342)
MVSSKSPIAKSACLVHLLEPRSHILKIFMKVIGTVFFFS
>orf02047
(SEQ ID NO: 343)
VVEQIPVGHNSGSFFLFLLLRLLLSPLLRNSISFLTSQGIPWKLSNNKTKPIDKPTASKS
IATNPLLLHLR
>orf02054
(SEQ ID NO: 344)
MSCTKIGVPFKKLTKKACKGYKILTRLSSQWQKEAPNQSRSAAIXXHSIH
>orf02075
(SEQ ID NO: 345)
MNQIQIQIIQAQFFYRFFQSLTSLLIGLLTIPKLGSYEHFFTWNSAIFDCLTNTFFILIN
RRRINMTITSLQGF
>orf02080
(SEQ ID NO: 346)
MLLLISLTQLIIFLFFERFNLLLKTFLLVDLKSNKSA
>orf02095
(SEQ ID NO: 347)
LIFIEYKIADKTITIIGLSRVNVGRRIALLIAYFIAK
>orf02098
(SEQ ID NO: 348)
VIPRYVTKHQGWDHNPHTITNSDDDPATLVTFRTFKFNVGNCTIPKNDQNGSSQKFSGIL
QCPCEIHLLDSP
>orf02100
(SEQ ID NO: 349)
VVPKTATSTETKTITRIIHYVDKVTNQNVKEDVVQPVTLSRTKTENKVTGVVTYGEWTTG
NWDEVISGKIDKYKDPDIPTVESQEVTSDSSDKEITVRYDRLSTPDKPTPEKPEIPSPQE
PGTPGEPTPEKPIPQPNPEHPSVPTPNPELPNQETPTPDKPTPEPGTPKTETPVNPDPEV
PTYETGKREELPNTGTEANATLASAGIMTLLAGLGLGFFKKKEDEK
>orf02105
(SEQ ID NO: 350)
MAYSTDFKQRALDSIKEGHSHVEAAKFFGVGVRTLFTWEKKDVNKDT
>orf02143
(SEQ ID NO: 351)
MPILQAKIDSFRPLFDGLTSRFKVGAGLFLKRFSFSRVKQILLALPQFSMMNPIVNG
>orf02158
(SEQ ID NO: 352)
MAVQANWSFDITHDSSFFFSNQKRGLNFSQMCFKDRRRNGFFDRKIFKFKFNNPIQIF
>orf02160
(SEQ ID NO: 353)
LFLQIKGIKPNHTIALASYIEQSFFFINKTVHFKIGKQLIRTLQTNPFVIQLNCHLFQGC
KKKCSQALSLMVRLDD
>orf02168
(SEQ ID NO: 354)
MEIVLVSFSISFQHFIIAYCLDFSSAGFRNSQNFSNFC
>orf02180
(SEQ ID NO: 355)
LNFNHVYFGYDENRPVLKDITCSIFKGQKIAFVGPSGSGKSTIVRLLERFYKPLSGDILM
EQSSIYDFNLKEWRSKIAWVSQNNAVLSGSIRDNLCLGLNRLVTDDELMKVLDLVSLGDE
IRSMKEGLDTEVGERGRFLSGGQSQRLQIARTYLKDAEILIFDEATANLDADSEYAIISS
LYSVLKEKTVVIIAHSLSTVKDVDCIFFLEEGKITGSGTHKELLENHERYARFVQEQMIE
>orf02181
(SEQ ID NO: 356)
LIYAEKSFFDKSQSGELTSAIVNDMSVIREFLITTFPNIILSLVMVLGSIVVLFSLDWNL
SLLLFITLPCMMFIILPLSNISEKYSRRLQKEIGFLTGQLTEKIQEHELIKTNQAEKSVQ
NVLDNCIERVQNNSLKSDRVTSFETPFALLFIFATIAVMLTYGSYRVSAGYISVGTLVSF
LIYLFQLLNPISNIANFVTVYSRSKGS
>orf02183
(SEQ ID NO: 357)
MKLKLLRVDTKVIMGSFFLVLSSLLALLLPLILKGLIDGSSIENIGSKVFQSFLIFIGQA
LFSSIGYYLFSQSGEKKIAKIRKKVI
>orf02196
(SEQ ID NO: 358)
LIRYLDQYEDVILREIKAQFPDVAVDKLMEEYIKAGLILRENKRYYLNFPTLESLDSLEL
DQEIFVREASPVYQALLEQSFETELRNQINAAILVEKTDFARIKMTLSNYFYKVKQQYPL
TEKQQELYDILGDVNPEYALKYMTAFLLKFLKKDHLMQKCRDIFVDSLVVLGYIVQNEDR
KYELAIDFDKERLTFYLA
>orf02197
(SEQ ID NO: 359)
MIGLKEVCRFLTDNTSLSTSMINHPIQINGNMAIVTCGSLDGLSHV
>orf02206
(SEQ ID NO: 360)
MLINDLTFFIFDISPIQSYKKVRLEITNLWNNTKNATSRGDSC
>orf02208
(SEQ ID NO: 361)
MRERVRLSGSLFTSLKTREHIKSTMELFHKYVFFLIQEIKIKMINFLKIGDLPTL
>orf02219
(SEQ ID NO: 362)
MIDHFEIKVKDLQISEGFYRSFLAPLDYKLTFKTSSLISFLSPNSPHPGGDFWLTQGTQD
PVHFAFLAENKEEVQACYEAGLEAGGRDNGVPGYRSEHPIYYAAFMIDLDGNNIEVVCHK
E
>orf02221
(SEQ ID NO: 363)
VIVFLSRNKDGNAFCHLDLISIANPVWGWDDDFITWIDHSHKEGIERIFGSRSDCHLI
>orf02224
(SEQ ID NO: 364)
LSNQFYFSLQTKPILKVKQFLLFQSQMTRVSEILQFSNKL
>orf02227
(SEQ ID NO: 365)
LFRLGQLISLNVAVHKPIKKFQGWIVLSSLPFQSLDILKFFRRFLSRYLVETLQLTGRIE
SQGIKHGLTFWF
>orf02229
(SEQ ID NO: 366)
MEDKEMGFYLMVASMLLGLLALKIGFSQFKEKKDKFLSILTSLAGTALVLVAVWLGWPK
>orf02250
(SEQ ID NO: 367)
MLDSDIGCSRKNLLGLFWIRRRRNIHIVDRAMEKGISNRAPNKISLKACFFNFF
>orf02278
(SEQ ID NO: 368)
LLHPFTRNITCDRHILTLLGNLVNFIHIDNATLCTFDVKVSNLQEFEEDIFHVLTHITSL
RQSCRIRNSKRYIQALSQGLGKESFP
>orf02279
(SEQ ID NO: 369)
VEIDAFVVVINRHCQGTLGTILTNYIVVQDMEEFNWFWHLRQVCQDFLNQFFSNDFLSQL
HAFITNKSIVASNYFLYFFLVFATK
>orf02285
(SEQ ID NO: 370)
MNXXGKGEEGEDLVVGVFKWLYSERLRFDTERVGGGGKGK
>orf02291
(SEQ ID NO: 371)
MHKNFVVVVTNFFTAVQFIQFNKEGTTCHNTTKFFNHLDSCLNSSTCRQKVIYNKNTLTW
LNGIRVHSQGIDTVLFFIVSRNNFAWQFTWLTNRRKTNSQLKGNWTTHDKSTSFRSHDHV
DFLVSSILNDFTNSVAISISISHQRTNITEGNAFLWIIFNCCNVIF
>orf02299
(SEQ ID NO: 372)
MLNRQVCFCFVNHISPLNVVIWENLSLEELLYAICICFITHKIAKQTSLTIDNAGIAMNN
IR
>orf02304
(SEQ ID NO: 373)
LDSRFFCTDFFKGRQAKGCSFSCTSLSLTDNILAFKGQRNSLFLDRTSFYKTSFFNFC
>orf02315
(SEQ ID NO: 374)
LLRKQEREYLRAENAILKKLRELRLKEEKEKEERQKLFKN
>orf02320
(SEQ ID NO: 375)
MRFLADQDRIQHHRYSWALFDKVQGLLSHTDSREKTNLNSPKFHITQAI
>orf02321
(SEQ ID NO: 376)
MLKNGIISWKDFKSFFCQGCQTSHCYKPMQVVQGIGSQISRQSTTTKNIISRKC
>orf02324
(SEQ ID NO: 377)
VTAHRIFGTSSIHSKLIGLAMLGITAMKIICHKLNRNHINIFRRLGIQGKTEFLLIHLIR
QVKMNDLSQGMNPTICPTSTVNSNDLPFI
>orf02328
(SEQ ID NO: 378)
MLARSKNCFMKSLSIFLLIFYFFDSYQISKKRRSLIGL
>orf02339
(SEQ ID NO: 379)
LEVCIHHHHQISCRILQACIKGCFFAKISRERNIMDCRILLPIGL
>orf02345
(SEQ ID NO: 380)
LTGNVICHPKLPDKISVKCLYSSKIQFKPRQRRLAMGMVTDFVSSIHNLKAAL
>orf02356
(SEQ ID NO: 381)
MGRKPKKRPEERTELERLQAENEYLRAENAILKKLRELRLKEEKEKEERQKLFKN
>orf02360
(SEQ ID NO: 382)
MDEIKNFRQWGSKTPGHPEVTHTSGVDATSGPLGQGISTAVGFAQAERFLAAKYNKDGFP
IFDHYTYVIAGDGDFMEGVSAEAASYAGHQALDKLIVLYDSNDICLDGETKDTFSENVRA
RYDAYGWHTVLVEDGTDLAAISTAIETAKFSGKPSLIEVKTVIGYGSPNKSGTNAVHGAP
LGAEETGATRKFLGWDYDPFEVPEEVYSDFKTNVADRGQEAYDAWASLVSDYKVAYPEVA
SEIDAIVAGKSPVTITEKDFPVYENGFSQATRNSSQDAINTAAVLPTFLGGSADLAHSNM
TYIKADGLQDKYNPLNRNIQFGVREFVMGTILNGMALHGGLRVYGGTFFVFSDYVKAAIR
LSAIQELPVTYVFTHDSIAVGEDGPTHEPVEHLAGLRSMPNLTVIRPADARETQATWHHA
LTSTTTPTVIVLTRQNLVVEEGTDFGKVAKGAYVVYDTPGFDTIIIATGSEVNLAIKAAK
ELVLQGGKVRVVSMPSTELFDAQDATYKEDILPSKTRRRVAIEMAATQSWYKYVGLDGAV
IGIDIFGASAPAQTVIDNYGFTVENIVAQVKSL
>orf02362
(SEQ ID NO: 383)
LNFLNEPRRQGNIGNKMAIHNIDMIRCYFIIQKSNLLFEFVQIHGHQRW
>orf02367
(SEQ ID NO: 384)
VIYSYDYPRLLHSRTLAMGNSNIIPNTGLSFCLSLIKTFDKLVSIRHITRLNQ
>orf02371
(SEQ ID NO: 385)
VSRKQEQMETLLLLLRDSKDYISAKVLGEKLNCSDKTVYRLVKGINKDCPVEAFILSEKG
RGFKLNPRSSLVDVDGNFTEAFDPEVRREKLLERLLLTAPKPHSIYDLGEEFYVSESVVL
KDKRQLQESLAIYGLDLKMRQRKLFIDGDEAQIRSAILNLLPMFNQLDLEQITQNKVQPL
DGELAHFCLGLLITLERELGVNIPYPYNINIFSHLYIFISRNRRSTSIHVVAPSKPTIVD
EKIYSVCQKIIQEIEQYFRMKVDAVEIDYLYQYVVSSRLQKPFSSGKLPFSQRVLDVTHY
YFSRMCMDNREIETTDPDFVDLASHISPLLRRLDNRVQIKNSLLSQILLTYPNLVKELTT
ISKEVSLVFGFASLSLDEIGFLVLYFARFQEKRARPLKTVVMCTSGVGTSELLRARLEKQ
FSELDIIDVVAYHQLDELINLYPDLDFIVTTVALQEPASVPFVLVSAFLTEGDKQRLQAK
IQEINYE
>orf02390
(SEQ ID NO: 386)
MMSMVDPIDQTFIVNLKIRKSQVFSQLQFSCHIVVYPSEVHIYQALVIKLQNHILGPQVL
P
>orf02391
(SEQ ID NO: 387)
LANRTRIDNQLPTSPVTKQLLVNMSINSNITGRMSHQAVKLLLFASMNQLSPPVLIRQMM
ANSHRQIPKLTMNLKRLIVEHFNFF
>orf02395
(SEQ ID NO: 388)
MDSIEFFHDKTFLFYLTSFYSKRMGVTTKMIKIAEGRFS
>orf02406
(SEQ ID NO: 389)
LTRFEEIFEEYKNPQDTFFYPLVYKENTYKKTAISIFALLMLGVCCLFLFSQQSYKKLVQ
YYANDQNLPSRITYSEYSDK
>orf02414
(SEQ ID NO: 390)
MIAEFIDGLQKFHFLQNALITAIVVGIVAGAVGCFIILRGMSLMGDAISHAVLPGVALSF
ILGLDFFIGAIVFGLLAAIIITYIKGNSIIKSDTAIGITFSSFLALGIILIGVAKSSTDL
FHILFGNILAVQDTDMFITMGVGAAILLLIWIFFKQLLITSFDELLAKAMGMPVNFYHYL
LMVLLTLVSVTAMQSVGTILIVAMLITPAATAYLYANSLKSMIFLSSTFGATASVLGLFI
GYSFNVAAGSSIVLTAASFFLISFFIAPKQRYLKLKNKHLLK
>orf02424
(SEQ ID NO: 391)
LNQEIIWKTRKSFTFKSRSLTDIRSRRKCLTNIQLSLIVRHLRQSRTLLAELNVNIPKRQ
IGPILTRFWPN
>orf02437
(SEQ ID NO: 392)
MQGEMRFSLVQFLTTLIKFCIFPFLLPNWLFGRKACTHWEFSFPKIKGVFEFHGISFINN
NKLKTTTSKKDENRGTTFIRKKI
>orf02438
(SEQ ID NO: 393)
MYEEPEVAPVHPTGPTPATETVDSIPGFEAPQESVTIL
>orf02468
(SEQ ID NO: 394)
MRLSWHFMRFKKLPLLINQTILDVGSTDINCNVICHKYLLLD
>orf02470
(SEQ ID NO: 395)
MGNNGQFTFGYRHDFFQNQLAIFNALVDTFTRRTIDIKTLNTFINEVLNQGTRTFWAYFS
LIIITCVEGWNDTFVFFQI
>orf02497
(SEQ ID NO: 396)
LSTRNKYCKNLIIFESTFNILDIVKKDLKLNSKLEKDLKY
>orf02499
(SEQ ID NO: 397)
MNRSVQERKCRYSIRKLSVGAVSMIVGAVVFGTSPVLAQEGASEQPLANETQLSGESSTL
TDTEKSQPSSETELSGNKQEQERKDKQEEKIPRDYYARDLENVETVIEKEDVETNASNGQ
RVDLSSELDKLKKLENATVHMEFKPDAKAPAFYNLFSVSSATKKDEYFTMAVYNNTATLE
GRGSDGKQFYNNYNDAPLKVKPGQWNSVTFTVEKPTAELPKGRVRLYVNGVLSRTSLRSG
NFIKDMPDVTHVQIGATKRANNTVWGSNLQIRNLTVYNRALTPEEVQKRSQLFKRSDLEK
KLPEGAALTEKTDIFESGRNGKPNKDGIKSYRIPALLKTDKGTLIAGADERRLHSSDWGD
IGMVIRRSEDNGKTWGDRVTITNLRDNPKASDPSIGSPVNIDMVLVQDPETKRIFSIYDM
FPEGKGIFGMSSQKEEAYKKIDGKTYQILYREGEKGAYTIRENGTVYTPDGKATDYRVVV
DPVKPAYSDKGDLYKGNQLLGNIYFTTNKTSPFRIAKDSYLWMSYSDDDGKTWSAPQDIT
PMVKADWMKFLGVGPGTGIVLRNGPHKGRILIPVYTTNNVSHLNGSQSSRIIYSDDHGKT
WHAGEAVNDNRQVDGQKIHSSTMNNRRAQNTESTVVQLNNGDVKLFMRGLTGDLQVATSK
DGGVTWEKDIKRYPQVKDVYVQMSAIHTMHEGKEYIILSNAGGPKRENGMVHLARVEENG
ELTWLKHNPIQKGEFAYNSLQELGNGEYGILYEHTEKGQNAYTLSFRKFNWDFLSKDLIS
PTEAKVKRTREMGKGVIGLEFDSEVLVNKAPTLQLANGKTARFMTQYDTKTLLFTVDSED
MGQKVTGLAEGAIESMHNLPVSVAGTKLSNGMNGSEAAVHEVPEYTGPLGTSGEEPAPTV
EKPEYTGPLGTSGEEPAPTVEKPEYTGPLGTAGEEAAPTVEKPEFTGGVNGTEPAVHEIA
EYKGSDSLVTLTTKEDYTYKAPLAQQALPETGNKESDLLASLGLTAFFLGLFTLGKKREQ
>orf02501
(SEQ ID NO: 398)
VDRTDEVSSKHCFEVVDRTDEVSSKHRFEVADRTDEVSNIYTARQS
>orf02512
(SEQ ID NO: 399)
MSCNCAFYRSQFFDVNSVSNYHSHQKELRFPNSILFTYFVKVT
>orf02535
(SEQ ID NO: 400)
VGLIKLTSYVFVCISNSFLTRHDKNDNICFFHGNFCLVLDLFHERSIDIINSSCINHAKR
TIEPLTRCINTVTCHSFDIFYNGDSLTSDPIK
>orf02537
(SEQ ID NO: 401)
LSSKSCIDRTNQETFHTLGLEGVGMKSGSLFCSVQISDKEKENSRLANGFLRYQFIQGIF
LLLTSYHNHRVGLEILPR
>orf02554
(SEQ ID NO: 402)
MKSKEQTRKLAVGCSKYSFEVADKTDEVSSKHCFEVVDRTDEVSNYIYGKAKLTWFEEIF
EEY
>orf02556
(SEQ ID NO: 403)
LSNSFFLIKFSSSKISGKKRIVSDNIFIRNKFICHFKKE
>orf02564
(SEQ ID NO: 404)
MDYSKVAAEVIEAVGKDNLVAAAHCATRLRLVLKDEAKVNQAALDNNADVKGTFSTNGQY
QIIIGPGDVNFVYAEIIKKTGLKEVSTDDLKEIANKDKKFNPLMDLIKLLSDIFVPIIPA
LVAGGLLMALRNFLTSPDLFGPQSIEDMYPAIKGFSAMIQLMSAAPFMFLPVLVGISAAK
RFGANQFLGAAIGMIMTTPDLGGKEAFWDILGFHVTQTNYAYQVIPVLVAVWLLANLEKF
FHKKLPSAVDFTFTPLLSVMITGFLTFTVIGPVMLVVSDAITNAIVWLYNTTGAFGMGLF
GGTYSLIVMTGLHQSFPAIETQLLSAYNNNGTGFGDYIFVVASMANVAQGAATLAVYFLT
KNAKTKGLSSSAAVSAFLGITEPALFGVNLKYKFPFFCALAGSAIGAFVAGLTHVIAVSL
GAAGFIGFLSIKAGSIPMYIIAEIMSFVAAFAFTYFYGKTKAASVFADEAATATAETVTE
PTVEAPVVEETDTLQNETLVTPIVGDVVALADVNDPVFSSGAMGQGIAVKPSQGVVYAPA
DAEVSIAFPTGHAFGLKTRNGAEVLIHVGIDTVSMNGDGFEAKVAQGNKVKAGDVLGTFD
SNKIAAAGLDDTTMVIVTNTADYASVAPVATGSVAKGNAVIEVKI
>orf02570
(SEQ ID NO: 405)
MTESYTWVEADRATLSRYRHGQGHLTDQFFSFKVQRPAAKTLIASISTGKGMGPSFDGTP
VITSGNQNRINTIKNSFIMSSSSVRISLRKLTSQRNFLRNLSSLILLAAQVAKGDATACS
HQRIGRVVGQDSHETLSLTEFF
>orf02571
(SEQ ID NO: 406)
MNINNEKVWFAFYLLDMQITRPTSTFNDRRIGLIGKLQELRFLAGNLLLR
>orf02572
(SEQ ID NO: 407)
LIKGYLPNHLSLMDLCSKTTCTLDDFAGIAGRRNHRGFFCHIGNGVFLTVDKYLWNQ
>orf02578
(SEQ ID NO: 408)
LIKLTGRNFSDILIKCLVKCFTNLLSNQLMLLPSTLKL
>orf02582
(SEQ ID NO: 409)
MIQSENHCSASHSNRDYQSQHDNQGRTCQCFIIVPCHKKGSCSVGEITWNQRCQNGQDKD
HSRCLIKNT
>orf02589
(SEQ ID NO: 410)
MIARQLMVFFSTNQADTRITNMSIDSLIINNSKDFQSSSHASVSFILTKLVNLLIFNF
>orf02590
(SEQ ID NO: 411)
MGEPFTHFIDCIDLGINPSYTQVCHRHFTSDIPCAMTSHPIS
>orf02597
(SEQ ID NO: 412)
LSSDSHFIGIKAFVILILGKSNSIVLRIVGLYQDLTCLFSTTCSTCHLSQELEGSLRRTE
IRQIQGRIRI
>orf02598
(SEQ ID NO: 413)
MAVHSLGIHMQGQRNIAVGTSIHRPTLPTHDKARITTAIEHENHLLFFNQTVLDSL
>orf02599
(SEQ ID NO: 414)
MVTGIAVLLISRFMLFINNHDTQIFQRSKDSRSGTNNNLGIATLHLAPFIILFTIG
>orf02600
(SEQ ID NO: 415)
VKNGYLVPKTCYKTLGHLRSQGNLRYQQNSCLALIQGTLDNLQVNLGLPTSCNPLK
>orf02601
(SEQ ID NO: 416)
MVNLIPRLGLDLLLIDCLIFQTKQAFSSQTHHFSLLGKV
>orf02602
(SEQ ID NO: 417)
LGLQTKNNPLNQAITLTKRHMNPHPNFQHSLKFLRNPVTIGLVRLHQGHIYDNLS
>orf02605
(SEQ ID NO: 418)
LGNHFCTICSTTYQAFLQFIQIWWCQEDKDSIWNLFLDLKSTLNFNFKENIDSLVQGFID
IGQRSSIVVADIFCVFQHLSLTNQLFKFFTSTEEIVNTVHFSRTLCACRHRYRILKLVFR
TLKNLSSNRSFSNP
>orf02618
(SEQ ID NO: 419)
VLLPNVLIKFINRFCWNVIPIKGCDSTFWNNKLIAIFKGNLDRGIHTIFCLHTT
>orf02628
(SEQ ID NO: 420)
VGCSYICHELVTNHDHFLFVIVEFLHSTVNTKCEGLQGPVNVINPKFLNCSLNAFFGVI
>orf02629
(SEQ ID NO: 421)
LLHLWRSIRVVPSNEGIIQIDQNSLDSLRLQAGDCQIIDCFHSKIWYIIFNRHSGSFS
>orf02631
(SEQ ID NO: 422)
LFGSCRQINHTSLQIRQGKEVFLGSSLAQEVIDLIPTLVHLLNDRIVGIADDFQTGKEKL
INRKRVMALQITSHLFNDIGVLGITNGNQATMLDNKGHGKSLIVGXXHSIH
>orf02633
(SEQ ID NO: 423)
VKGLLLATKLCRTNSHTDNLTRYSNRSICQNDLISHIQLTFKEDEKAIDDIRQKALGSHT
NRYPSNTSSSQQTRNWQT
>orf02635
(SEQ ID NO: 424)
LWGILGLTLPNLSGIGLLGDLFVGGLKAVAPILVFALVANALSQHQKGQDSNMKTVVFLY
IL
>orf02637
(SEQ ID NO: 425)
MIGTFAAALVAVLASFIVPIEITLNSANTEIAPPDGIGQVLSNLLLKLVDNPVNALLTAN
YIRILSWAVIFGIAMREASKNSKELLKTIADVTSKIVEWIINLAPFGILGLVFKTISDKG
VGSLANYGILLVLLVTTMLFVAPVVNPLIAFFFMRRNPYPLVWNCLRVSGVTAFFTRSST
TNIPVNMKLCHDLGLNPDTYSVSIPLGSTINMAGVAITINLLTLVTVNTLGIPVDFATAF
VLSVVAAISACGASGGASGIAGGSLLLIPVAGSLFGISNDIAIQIVGVGFVIGVIQDSCE
TALNSSTDVLFTAVAEYAATRKKASLLMSCLLRFYSNLLGNSYVY
>orf02639
(SEQ ID NO: 426)
MIAHAIIILLFKNAGKLCFLVVFFFTVHTFGKNQLLLG
>orf02645
(SEQ ID NO: 427)
VFEVVDKTDEVSSKHCFEVADRTDEVSNHTYGKVKLTWFEEIFEEYHTKKPCSSR
>orf02651
(SEQ ID NO: 428)
MKNRIIDVFEVVNRILVITVENPDFEDLRVNQFVKIGDKKYRVRSGPMIHSTPPQSVLDR
DTFTIDYTDDELLDKEAVFTTH
>orf02657
(SEQ ID NO: 429)
MAYIEYKQRGKKRLWSFSIRERSKSLLHKSGFKTKREAKIEAEKVLHKLNTGSVLSSSMT
LSELYNEWLDLKILPSNRSVVTKKKYLMRKKVIERLFGNKPVSQIKPSEYQKIMNEYGET
VSRNFLGRLNSSIQASIQMAIADKVIIEDFTAYVELFSSKSGQKVEEKYLHTESDYQKVL
VYLKNKFDYQKSIVPYVIYFLFKTGMRFSELIALTWDEVDELNEQLKTYRRYNTAIHKFT
PPKNNTSIRLVPITSDMLSLLKTLKILQLKTNKELNIDNENNLIFQHFGYVYDVPDIATV
NKAIKVMLKELQIFPLITTKGARHTYGSYLWHNNIDLGVIAKILGHKDISMLIDVYGHTL
EEKISEEFTAVKSLL
>orf02658
(SEQ ID NO: 430)
MKDTISNKDLISMGYRPSTANAIIHQVRELLVSRGYTFYNRKRLMVVPKSVVKELLGMEL
>orf02659
(SEQ ID NO: 431)
MNKEVLNRAPSNSPITIHQMSNKSYSKFQEEVSLKYGFIGLKLDKLSLTAEVSEEFHSEI
LSGNFTLYDYFGVVEPNLNRNGELASYKGQFFNDEKENWYIEYTPVASIKMNKRPLKIEF
TPSKVSKKNFLIVFHRMFPYMFNIAISTFHLAYDFERDLSALRVNWPKVMYRPIYKGMKL
ETMDFGAPKGNYHLTAYNKLKERMDSGDMAEIEIYQQYDNLWRIEYKFYNEGNIKKELKN
GLPFLAKIPVYIENFKGLEFNNLGVNEKIYLFALRNKPELFAESDKRTVAKYKKLAESIS
EVNLNVFFQNALDFVEIFNQEPCLINFFEFMNSMLQGDIPKLTINQE
>orf02660
(SEQ ID NO: 432)
MHFDKSKFGAVFSAPGLYEVEVINNASFGQNAQYEVIQSRKLGTFAELIEMAKIK
>orf02661
(SEQ ID NO: 433)
MFKIKQTASLSEHYFLNTSKLRSIRWFTIGFLSILSLYSCILFKGWFLQMFTLSVGLIVT
LYFERKIKGCFHQIEPLLIVRENLLFMLRRNSFLFTATKDGAILRSAKFNYQLNDVSIVI
QALKSGDEFTREMDDLDVLLSSVLGISLSYKEIYATHVEYVFVYRQPERLHITSLPLEED
NSLKIKIYDDFIIDLRKNFSMLISGASGAGKSFFTYYYLTRFISQTVNGRHAKIYVIDPK
LSDIYKLSKFSGLPVENYGTTNEDAFRIVRHYINEMNRRMEIYNKSDLFDSIGIDLGLPP
LLLVIEEYSSLVASMDSKAKKDFENMVAIVAQKARSLSMGVCIVMQQPRSDSLSTNIREQ
LVNAIFLGAPTRESSQMMFGTTDVPKVKKDKGVGLYSTDREPPKEFHSPMFDRDVFEVIL
PVWEWAAKDYMKDEDEDV
>orf02662
(SEQ ID NO: 434)
MKQKQPIVSRTKQHTFEELIQDQKLERLANLSPDLVGRYGFTASCASSFANLIKEAYGGK
NLNVVYASRMLALWNIACSCYHKADGYSLADALFSDKKICLDYFYYHNNTSDIITLDMIE
DVKKNYLQLVTTATSDNMSVIEFEMEKESDLYYFIKATLGSSFSRMHYSVLVKALAGALA
KNI
>orf02664
(SEQ ID NO: 435)
MGWKGTPPCLHPSNQDTTILIVQQCLRRIEVLAMINFLN
>orf02665
(SEQ ID NO: 436)
VFGSYYGVIASIFFKEFWITEISSNQLIWQVCSSYNWILGNLFKVNPVI
>orf02666
(SEQ ID NO: 437)
VLPSHQVLTFSMSPVHRPPNTIIWIELIKEMVFSTKIDKSIWIIDPTNLS
>orf02689
(SEQ ID NO: 438)
LIVSLKTKSRKAKDMAESIQGWLAQFLVNLFKSITFDCGKEFSKWKDISNHHDSESFFAN
LGCPRQRCLNEHSNRLLRCHDLPKQTDFNEVSQEF
>orf02690
(SEQ ID NO: 439)
VVEIIYFLIIIIASGLGSISGMGGGIIIKPLMDSFGYHSVSDIAFYSSFSVFIMAIISTT
KRFSQSKEIKWRLIFTVSFSSVLGGFLGHLIFQVLLSQLSVRLVSIVQMILLFVMLLVSF
VLTDFKKTYQFDKIGFYMICGLLLGLISSFLGIGGGPLNVSLLMVFFSISIKEATMYSLA
IIFFSQLSHLATIVVVTGLNQYHLAPVPVIFLASICGGVLGTVVSKVLPENWVRYCFKGM
LFFVMGMTLYNLFHIL
>orf02691
(SEQ ID NO: 440)
MMGTNSEEGFLDDFEGPQVAVSVKDFSIADTPVTNQEFAQFVKETGYKTLAERQEWSFVF
ILFVPEAEREGYPHPAGAPWWLQVSNACWKHPYGENSNLVGLEDHPVVHVALEDALAFCN
WSGMSLPTEAQWEYAARGGRQSEYPWGDTLLEGGYYHANTWQGRFPYENTALDGFIGTAP
VYEFLPNDFGLYQMIGNVWEWCRNPRYTLLASFNEDDYELPKYGIQDEEYAIRGGSFLCH
CSYCNRYRVAARNGCISTSTSSHLGFRCLKE
>orf02694
(SEQ ID NO: 441)
MVQTKQPNIILIVVDQMRADALSLNSKDKLVSTPTLDMMASVGYNFENAYSPVPSCVPAR
AALLTGLDQDKSGRVGYQDEVPWNFTNTLPKVFKDMGYQTECIGKMHVFPSRQRLGFDHV
LLHDGYLHVDRKYDKTYGSQFDYASDYLAFLKGKVGYDVDLIDDGMDCNSWEARPWDKDE
KLHPTNWVVSESISFLQRRDPTVPFFLKMSFEKPHAPLNPPKYYFDMYMERLPQFLDLHI
GNWEVLEKQIPSIYALRGKLKEDDQRRMVAAYFGLITHIDHQISRFLTALKEFRHDKDTI
IWFVSDHGDQLGEHYLFRKGYPYQGSIHIPSFIYDPAGLIAGNRGTIKQLVKIQDIFPSL
VDLAGGTTTDELDGRSVKNLLFGQYEGWRTEFHGEHALGKDSSQYILTDQWKFIWFPVLN
HYQLFDMKKDPHEMNDLYPSEKYQPIVRQMKKKLVDFLRYREEGFVVDEELVPVELSKIT
PTLTKTGDSQS
>orf02696
(SEQ ID NO: 442)
MNTMLDKMQEKLSPIAMKVGNQKFLVALRDSFVGTMPVIMTGSIALLLNAFLVDLPQQFH
LESITKTFQWLVDINNLVFKGSIPIVSLLFIYCLGVNIAKIYKVDTVSAGLVSLASFVIS
IGSTVTKSFPLANVGDVKLDQILQGIDNLAFDGKNLMVTIGNVIPGNHINARGYFTAMMI
GFLASIIFCKVMKKNWVIKLPDSVPPAIAKPFTSIIPGFMAMYIVAILTYVFHLLSNDLL
IDWVYKVLQTPLLGLSQSFFAVILMIFLNKLFWFFGLHGGNVLAPIMEGLFGVAMLANLD
AFQKGEPIPYIWTSGSFGAFVWFGGLGLVLAILIFSRNSHYRKVAKLGLAPVLFNIGEPV
NYGLPVVLNPLLFIPFVLSPVFMATVAYWATSWGLVSPVTQNVTWVMPPILYGFFSTAFD
WRAIILSVVCLIISVLTYFPFVKMADKTELS
>orf02697
(SEQ ID NO: 443)
MDESNLESVMGLIMYGGEAKSNAMEAIQAAKKGDFSKANRRLADANAALLQAHKAQTEML
TREAQGEETSISLLMVHAQDHLMTSLTFVDLAKEVVEVYERFEKN
>orf02698
(SEQ ID NO: 444)
MAKVTIMLACAAGMSTSLLVTKMQKAAEDKGLDAEIFAVPAPEAEEIVATKEVNVLLLGP
QVRYLLGDFQEKLKDRQIPVAVIPMTDYGMMNGSKVLDLAESLLD
>orf02699
(SEQ ID NO: 445)
MKRLISANPSEILQMNAEELKQSILASEGRVVLSENVVTRETFVGDITNSEIARAFGADM
ILLNCVDVFEPKIYALDSSGDDVIHRLHQLVACPIGVNLEPIDPSAKMLEETQEIVAGRV
ASVETLKRIEELGFDFVCLTGNPGTGVSNREIIKAVQTAKENFSGLIIAGKMHGAGVNEP
VAELSVAEQLLEAGADVILVPAVGTVPAFHDQELREVVDLVHSKGGLVLSAIGTSQETSD
TDTIKEIALRNKICGVDIQHIGDAGYGGLATVDNIYALSKAIRGVRHTVSRLARSVNR
>orf02700
(SEQ ID NO: 446)
MEKLLQEKLLPVAARLGNNKALVSIRDGITLTIPLLLIGSLLMVIASFPIPGWEKYLGDI
GVADYLWKGVDSSFGLLGLVASFGIAYFMARQYKVDGIPAGIVSLSSFITVTPFITGEAG
AGMPTAFMASKGLFVAMILGLINGYIYQWFINHNIQIKMPDGVPPAVSKSFSAIIPGAVT
IVGWLIVYATLDKLSLPNLHEIAQVALGGPLGLLGNNVIGLLILIFLNSSFWFVGLHGGN
VVNAVMKPLWLANLDANKVAYQTGETLPNIFTSVFMDNFVFIGGGGATIGLVLALGYLAH
KKKASKQLKTLAPITVIPGLFNINEPAMFGVPIVLNILLLVPFILAPMFNLLVAWGAMAS
GLVPLTYTDPGWTMPPVISGLLATGSISGSLLQIVLIVLDVLLYLPFVIAIEKRFKLLED
>orf02701
(SEQ ID NO: 447)
MTLSKKQLQLRAKILETVYTLGPISRIEIATKTGITPATTSSITNDLIKENILLELGEDE
HDTSVGRKKILLDIQAKRFYYIGCELSEKHFTFALGDNLGNILKEEKEIVTKQLIQEKGN
QLINQTLKQFLNNCSDYEIEAIGIALPGRYLDDYKITTNNPLWQHIDLEMIQSHFDKPLF
FSNNVNCMAIGKRLFSRQQNDTNFAYFHFARGMHCSYIYDGNIYGKGNLMIGEIGHTVVS
SEGEECSCGRKGCLQTFAGEAWLIKKSKILYHQSPYSLLPSLVKNADDIDIQVILTAYQL
GDTGIITLIHQALLYLSQTILNISMMIDSQKIYLHSPLLTNQHIIQKLYSEMNYKPKLLY
NRLPEVIIEPYNDFTAAHSAIALCLYHTILHS
>orf02719
(SEQ ID NO: 448)
MPFKENLICQHRNHHCSVFFISLGLLHNIHIEIDISQTRASFLDLSDYLQAVLMILQKFC
QAIGLAQRLDLLQLHLLHLTRLLL
>orf02728
(SEQ ID NO: 449)
MYLLLLVVKDHIALIDKEMHVWRPNCILRDLTNFFIKRNHIVTNKTNGSPTKREV
>orf02729
(SEQ ID NO: 450)
MVLALMNHFIKEIQGIPINRLTILIENSIFKLNLKNWIIG
>orf02731
(SEQ ID NO: 451)
MKIKEQTRKLAAGCSKHCFEVVDRTDEVSSKHCFEVADRTDEVSSKHCFEVADRTDEVSN
HTYGKATLTRFEEIFEEYKGVPR
>orf02743
(SEQ ID NO: 452)
LVEQLTFNQWVTGSSPVRVIYAGLAELADAPDLGSGA
>orf02745
(SEQ ID NO: 453)
VCQRMDARTCKTTIIAVHNVLTALQQTWIAVQLYQTK
>orf02746
(SEQ ID NO: 454)
LHLGKSILSLPVKGKDLEFLVHLFVINHWIGFPSRTSTFCRCKVLNGME
>orf02747
(SEQ ID NO: 455)
LEQTVIIANNPCELYWDNHLSFLSDSLLKQVIVHLKRICLDIHHDRGCSHVRNDTT
>orf02749
(SEQ ID NO: 456)
LTDDGVLILVVDAGWRGNSCLQEQGCHHFRAILLCITWHFRSCTDKGHLTFKDIDQLRQF
VQTDTSDEISNLGNTAIVSRSHQTSFFIRIRHHGTKLPNLEPTVVLGHTLLLVNHWPLAI
QLDPNAQDEKDGRGQNQ
>orf02750
(SEQ ID NO: 457)
MLKMRKMGEVRTSKIKAKTQSKQRLKISEPFLLETSW
>orf02765
(SEQ ID NO: 458)
MDYNAVIPEFLVSNIEQSRSFYCGLLGFRIEYQRPEENFLFLLKSVN
>orf02766
(SEQ ID NO: 459)
MLEEGTKDQLAELTYPFGRGVNLSFGIKDVSKLYQKVMEANYPIYRPLTKRKFRVSDPYI
YPHKFAVLDPDGYFLRFSE
>orf02771
(SEQ ID NO: 460)
LACDKHGKGCFTDISALLIGDIHIHHTGCTTLMDTFSFNGQYIVEFSCLKVVDRGLECHP
IKSQRDNHQTTDLVT
>orf02773
(SEQ ID NO: 461)
MGIAIVVERRVHYFGRHHNVTISHFFNFVIFKGRYSVKMKVFHRFLLIFQTTL
>orf02784
(SEQ ID NO: 462)
MIACRHDICKSQKGLEHPFCIVRRLTRDFNQRPVCIVEANIFCLKITPQIIANMIVARTV
KSSKTGITLTTSMCKRDNHKITWFHRRNGFPSFFNNPNRFVSTIFVSNFRFWITVPP
>orf02799
(SEQ ID NO: 463)
MNMNKDQIAILNGADNLNLTLWMTLKEICKEGCKSFFPVRNTCRMLDIGIPYRLGLSLSN
SSVLNGMDV
>orf02814
(SEQ ID NO: 464)
MDGQLHHRAIFDWVHFENFINSWLGFLTINLKTTGQGAEIVLIGHTFNTRDINLVNLITR
VNHLVCKVPIIGQNQDTRCIPVQTTHRVNTFFDIGQEVDNRLATLVICYTGNDTAWFVKQ
IIDLFFVVDRLTFNFDLVA
>orf02820
(SEQ ID NO: 465)
MHKLRIFVNQLYRRFGIILGPFLVLGFQVLTQELELAIFFDLREEVLLQVIPQVCHFCYL
RKEFTTLNQHELTSHDHVLTRHFQTHGLQG
>orf02831
(SEQ ID NO: 466)
MLHMNLFFQPFFTNLCKTLATGCCVKTVMEWSSIATTIDFKIIE
>orf02832
(SEQ ID NO: 467)
LDNRAKEWIMSTAQNQAIHLSNQGTQGFIDHLLGNTG
>orf02843
(SEQ ID NO: 468)
LSNFCFKTVTVHRYSVNTNVNQNFSTISCFQTKSVPCWKGN
>orf02853
(SEQ ID NO: 469)
MKIKEQTRKLAAGCSKHCFEVVDETDEVSNHTYGKATLTWFEEIFE
>orf02858
(SEQ ID NO: 470)
MSIVKSHSFSISLGIFNSFWNNIHTSECFYFLCKGKSNRSNSTISVNQMVFFINIQRFYC
FAIEDFCLLRI
>orf02859
(SEQ ID NO: 471)
LNTLLPPDNLCLFTIYLTGFSCICINSYCHNFWEIFNQLFYQLS
>orf02865
(SEQ ID NO: 472)
MIDKVIEQYKSHDNLDIRVELHKKYSKNKLGFNNWIFSNYQITDEVKVLELGCGTGELWK
SNSDSIDKMKQLIVTDFSKDMVKSTKSVIGNRNNVNYEIMDIQKISFENETFDIVIASML
LHHVNDIPKALSEVNRVLKTGGIFYCATFGENGVVNYLASLFKDEVNQDLENRTFTLQNG
KRYLSRYFNSVDTLLYDDELQVTSIDDLVKYIQSFKGISEIGSLEEEIIRKRLESEFNNG
MLIIPKEYGMFIARKES
>orf02867
(SEQ ID NO: 473)
MDLGFDYFGSALTISPHKNSQTINSIGIDVQKIYTPHYLPNDFKKNQGYKRSVEMCEEYD
IYRQCYCGCVYAAQAQNIDLV
>orf02868
(SEQ ID NO: 474)
LTKYADVTIYFANSNIHPKAEYHKRVYVTKKFVSDFNERTGNTVQYLEAPYEPN
>orf02876
(SEQ ID NO: 475)
MYNKVILIGRLTSTPELHKTNNDKSVARATIAVNRRYKDQNGEREADFVNMVLWGRLAET
LASYATKGSLISVDGELRTRRFEKNGQMNYVTEVLVTGFQLLESRAQRAMRENNAGQDLA
DLVLEEEELPF
>orf02880
(SEQ ID NO: 476)
MQFTRTAHHTKTLFTTKFTWENEIPFWHHSSRKRDNGFQPHTRIGSSCNDLYSLITCDCN
LADVEVVTIWMGYHLNNFTDNKLRFLIINNFFCKTFRLQLLVQTSDLLICQKDLTALCNF
K
>orf02885
(SEQ ID NO: 477)
MSYSVDDVVSNAFKKRMILDSFFAFNCSGTMKVSTWVYDKGEWYYVSSSGAMIANDWVKD
NGK
>orf02895
(SEQ ID NO: 478)
LTSFCFKANMFNNCLRICRIAEGHILKLDLTFEVFISQLHLNRVLDRRMQI
>orf02897
(SEQ ID NO: 479)
LINPLSRDHSSGKNDEECSHEKEAHDNLHSIRHENNHVTKERQTRYRSSVVNHIGPNPVN
RHTQTT
>orf02900
(SEQ ID NO: 480)
LHLRTCFVRQTNKLSPLINRTRLQFHQTILHYTLNQITSNRLGNIEFLLDIFNQDQVLVF
LAIIQKMHNLTLRPTHKFNAATFGFLLHHQVNLMTKTLKD
>orf02916
(SEQ ID NO: 481)
MLEIWKYRPFVSEFWNDEKNNHDKQFVDPISLYLTLKDDDDPRIEEESEALENMILQYLG
EDDAS
>orf02918
(SEQ ID NO: 482)
LTLFFFELLICLLNSEFDLSKFIFVYFDEYFHEDSLKMNLHQFSFSF
>orf02924
(SEQ ID NO: 483)
MAFNQFNRCIGLSIPTAPNVPGTIINRSYLHDATVPNNVREKT
>orf02940
(SEQ ID NO: 484)
LRLQIELTWFEEIFEEYKFEIMKIRQTGGCFVSHLTERDGLRVT
>orf02944
(SEQ ID NO: 485)
MKKNRGIQKLAILVLLGVFMFSNTIPYQQFIQKNRQLEIRVQSQKKSNGLDVGKAD
>orf02946
(SEQ ID NO: 486)
MKKLFILISNLLASLFFVWVLTIWTDTYVSHYYPNVVVRDSSPETTFQHVATRLEKLAEE
TDSFIAIQHQDPNSEGTTVFSYTTFGDGKLPDGLQEKNLEDAQSSSVETNYFVFDGHLDI
HLLREELSQLGLTNMHLTIPSKLSTLMAIFSNGFQLISLLIFILTFVALTLISQISQLRS
SGIRLISGEKRWSIFLRPVGEDLKAIAVGFSLAGVLAILMQKILSLPTQSLMTIGEGLLS
YNLILLSISLFFAQLFAVGIKKIHLMQIIKGQVPVRGIISLILIGQLLAIIIVTLGIGSS
LKYSQAWQQHRIGQEIWSQERQLITLSISREGTSPGFDEQAQRKLRTWYQLMDLAVSEQK
AFLSRHQLIDRTLQNGMASSKNLITSTEWHDYNPNGNVLIVTPQYLERQNIPVDTTIEQK
MNHLNVGEFVLLLPEHLRSEEEHYKSVFEDDLTSRISSQDERQQMTATVGYLESGQDRFV
YNTTPISYQQFLKDPIIIVITPQSTGPQSILFWIDAVQNYVLFNQLSDAQELIQRQGIEN
WVSEMQTGYHNYITLLDNIQRERWVMLAGAVLGIATSILLFNTMNRLYFEEFRRAIFIKR
IAGLRFLEIHRTYLFAQLGVFLLGFVASVFLQVEIGVAFLVLLLFTGLSLLQLHVQMQKE
NKMSILVLKGG
>orf02955
(SEQ ID NO: 487)
VLKWCILRINHHISRKVDNFLEGTRAHIKGQAHTAWNPLEVPDVRYRSFQFDMSHTLTTN
FRTRYFNPTAVTNNSSVTNTFVLTTSTFPVFCRTKDHFIKESFTFWFQGTIIDCFRFFDF
SIRP
>orf02962
(SEQ ID NO: 488)
LVDPLVTSHDNLLSKGSIFIQTRVSLSYSIFIFFISCQPNNFRS
>orf02966
(SEQ ID NO: 489)
MPWKELCHKLAPKVFKVIRIYSRENKKSPSNWAFCSFET
>orf02970
(SEQ ID NO: 490)
VSVLFFCSYFSLSLEKGWFSSLISCKFMNQFLPFCWRQDSPWILTLAQDSITYH
>orf02978
(SEQ ID NO: 491)
VTDENTRKVRSLVAFFSIVIGYILSSFFISLYHLWQEALRGLL
>orf02979
(SEQ ID NO: 492)
MRLLFFFANRVIRSKENSSTCPSRSYNLLINTSNVSHITIAVNGTCTGNNTTITKIWVSY
LSIDS
>orf02983
(SEQ ID NO: 493)
VDSLFLSLGEEGNQEINLQESFSSTDCNPTLISPETTVAQGLCQDIIYRPFT
>orf02985
(SEQ ID NO: 494)
VNPKSLGSFFLQDSKGFKELVLGHAKLSLPRIVHNVCPQFKNASRIITTRDDFWNACYSL
QMFNIFKGIQVNGRTQFTCIGVFLVWRVVGREHNLRTQKVQFMAHQKLYITRAVHTTTFF
LENFQNSWSWSSLNCKIFLKALVPRKSLVDGSCLLTNPLLIIQVKGSRELGNNRF
>orf02989
(SEQ ID NO: 495)
MTTIRSLLLNFISISYSIFIQKIKKQTRKLVAGGSKHCF
>orf03003
(SEQ ID NO: 496)
MDALVLQKNQETIQQIAVKIRFLDGHDYYSLIDIDNRRTNQTVFPFVNFEDIAF
>orf03004
(SEQ ID NO: 497)
MAFFTEIPTRACLINLAITLHIVETCQGFNDLSLHLRVLAL
>orf03008
(SEQ ID NO: 498)
MLLPLPFNTSKIKQIAMHSDLNQKEMIGHIFHDEDIF
>orf03013
(SEQ ID NO: 499)
MKQTVKKLALVASIAATLGGSVAVASAAVQYPEGGVWTYGSGNGGAYSNYYHPSKYHSST
VVSRKTGSSDKGYAGAGGTSRAWIRTSWGEKVAFYYNV
>orf03018
(SEQ ID NO: 500)
MLNRRFIKTNNIHLCHTHLSSQGNFFCLTTCKFFYIQVCMCIKNHLF
>orf03029
(SEQ ID NO: 501)
MNTIERTRRLVKGCATHCFEVVDRTDEVSSKHCFEVADETDEVSSKHCFEVADETDEVSS
KHVFEVVDETDEVSSKHVFEVVDETDEVSSKHVFEVVDETDEVSNHTYGKATLTWFAEIF
EEY
>orf03033
(SEQ ID NO: 502)
MLERLKSIHYMFWASLIFMLFPILPVVIGELPAWHLLVDILFVVTYLGVLITKNQRLSWL
FWGLMLVYVAGNTAFVAGNYIWFFFFLSNLLIYHFGVRSLKSLHVWTFLLAQVLVVGRLL
IFQRIEVEFLVYMLVILTFVDLMTLGSVRIRLVEDLKEAQVEQNTQINLLLAENERNRIG
QDLHDSLGHTFAMLSVKTDLALQLFQMQAYPQVEKELREIQQISKESMCEVRTIVENLKS
RTLTSELETVKKMLEIAGIEVETDNQLDTASLTQELDSMASMILLELVTNIIKHAKASKA
YLKLERTEKELILTVSDDGCGFAFLKGDELHTVRDRVFPFSGEVSVISQKHPTEVQVRLP
YNERN
>orf03036
(SEQ ID NO: 503)
MTVVKVEKLSKKIKDKEILRNISFEINDGECVALIGPNGAGKTTLLDCLLGDKLVTSGQV
SIQGLPVTSSKLDYTRAYLPQENVIVQKLKVKELIAFFQRIYPNPLSNQEIDQLLQFVKQ
QKEQLAEKLSGGQKRLFSFVLTLIGRPKIVFLDEPTASMDTSTRQRFWEIVQELKAQGVT
ILYSSHYIEEVEHTADRILLLNKGELIRDTTPLAMRSEEIEKHFILPIAYKEVVEQSNLV
ENWTLKQDSLQVVTREADAFWELLAQAGCRMQEIEVNNRSLLNTIFEETQKGDN
>orf03039
(SEQ ID NO: 504)
MGEEEMRNKMIIAMSLVVTGVMTYLMFSGLDEDFCHFPWKVFAGFGIMS
>orf03040
(SEQ ID NO: 505)
LVEQLTFNQWVTGSSPVRVIYAGLAELADAPDLGSGA
>orf03063
(SEQ ID NO: 506)
MPSLRSLKKTDGSCDELHHFDLPVNFFKNTVLGKQTCSGVIREVCQDCFNMLWR
>orf03091
(SEQ ID NO: 507)
LHTSFRSSVGHSHTWHQDIVRPILFSRFNDSIVILWQNCPTFNQGIYCYLDCFFPIVSL
>orf03096
(SEQ ID NO: 508)
MWSQTLGLIHPLTSLLELPFWMACLKGFGQFCKSLSGLLSFVAECQHLLSLCSRFIRITV
LQTSKV
>orf03112
(SEQ ID NO: 509)
MLEQARLKVEQQAIKNIQFLEQDLPKNPLEKEFDCLAVSRVLHHMPDLDAALSLFHQHLK
EDGKLIIADFTKTEANHHGFDLAELENKLIEHGFSSVHSQILYSAEDLFQGNHSEFFLIV
AQKSLA
>orf03113
(SEQ ID NO: 510)
MKHDFNHKAETFDFPKNIFLANLVCQAAEKQIDLLSDKEILDFGGGTGLLALPLTPSQAG
>orf03117
(SEQ ID NO: 511)
MVDLQSFFTRKYLNLNSVDAYLILPRLQGHLSYPQDFFLLQDFCFLLPIFLNLSQKEGRN
AGKDS
>orf03133
(SEQ ID NO: 512)
MRIRNSPFDHILQTIFEFEDRTCQVTCRFEACSSICNDNWEFSQHIISVFQSPSCHTVCD
KSDVFCSFLFDKNFASLWIYVVTITDQLCXXIPFIN
>orf03142
(SEQ ID NO: 513)
MHKTCLNIWKFLFYQIESLIHQMAADKSPCRIGNRGR
>orf03144
(SEQ ID NO: 514)
LNHRFNRQTTKVGRSTIWANGTVNRLIIFVIRSTCIVLINGHSFRCQTSSSTSLPNTKDK
VRLITIHLFFQYLSRFVKNCRHL
>orf03147
(SEQ ID NO: 515)
MTLHQTFRFQNFEMPCQSSLINFQTLLNRHLVTRRMLQQKQ
>orf03151
(SEQ ID NO: 516)
MKKRMLLASTVALSFAPVLATQAEEVLWTARSVEQIQNDLTKTDNKTSYTVQYGDTLSTI
AEALGVDVTVLANLNKITNMDLIFPETVLTTTVNEAEEVTEVEIQTPQADSSEEVTTATA
DLTTNQVTVDDQTVQVADLSQPIAEAPKEVASSSEVTKTVIASEEVAPSTGTSVPEEQTA
ETTRPVEEATPQETTPAEKQETQASPQAALAVEATTTSSEAKEVASSNGATAAVSTYQSE
ETKVISTTYEAPAAPDYAGLAVAKSENAGLQPQTAAFKEEIANLFGITSFSGYRPGDSGD
HGKGLAIDFMVPERSELGDKIAEYAIQNMASRGISYIIWKQRFYAPFDSKYGPANTWNPM
PDRGSVTENHYDHVHVSMNG
>orf03156
(SEQ ID NO: 517)
MSNQITVHHSHEHLQKVFTHSWQCNIKNVFIFLKQSLLLMKRNSVGFPTEFTPSILKS
>orf03171
(SEQ ID NO: 518)
MAELNSVITTVTGIENRLGAVILAEIRNIHAFDNPAQLQAFAGLDSSIYQSGQIDLAGRM
VKRGSPHLR
>orf03178
(SEQ ID NO: 519)
MEXXXDIRKGRHAVVEKVMGAQTYIPNTIQMAEDTSIQLITGPNMSGKSTYMRQLAMTAV
MAQLGSYVPAESAHLPIFDAIFTRIGAADDLVSGQSTFMVEMMEANNAISHATKNSLILF
DELGRGTATYDGMALAQSIIEYIHEHIGAKTLFATHYHELTSLESSLQHLVNVHVATLEQ
DGQVTFLHKIEPGPADKSYGIHVAKIAGLPADLLARADKILTQLENQGTESPPPMRQTSA
VTEQISLFDRAEEHPILAELAKLDVYNMTPMQVMNVLVELKQKL
>orf03191
(SEQ ID NO: 520)
LTNLSSVDSEELFQFYRERGNAENFIKERKAGFFGDKTDSSTMIKNEIRMMMGCLAYNLY
LELKQLAGDEVKALTIKRFRRLFLHIAGKYVSTARRHILKFSSLYAYSKQFQALFDTICQ
INLILPVPYRARGQGKTCLTE
>orf03203
(SEQ ID NO: 521)
LFDDRQAINICPPTNGSLRLTSLQVDQNPCPPSTNLNKILARSQFLNHIQQISLSLELLQ
ANLWNLV
>orf03207
(SEQ ID NO: 522)
LSVHFCSSHRCLLVRYNDTYSTKKGLKFETFLSVFRYDFLGM
>orf03237
(SEQ ID NO: 523)
MDFFNYLLWMICHNHGLHTLLLSKDCVCHTARDKDGNHRIKSVFPTKGQTCYQHDSSIYQ
ERNTTDILTRFLANSQADDIRPTTGDIVSKSKTNPQTHNNTPKKGIDNGILRQGCHRDKL
DKEGTHRYRDKGKDGELMANLIPS
>orf03245
(SEQ ID NO: 524)
MKIKEQTRKLAAGCSKHCFEVVDETDEVSSKHGFEVVDETDEVSSKHGFEVVDETDEVSN
HTYGKATLTWFEEIFEEH
>orf03253
(SEQ ID NO: 525)
MKIKEQTRKLAAGCSKHCFEVVDRTDEVSSKHGFEVVDETDEVSNHTYGKVKLTWFEEIL
EEY
>orf03254
(SEQ ID NO: 526)
LFFKDEKQALYTKPKTKSSSFRASKVSNQTIVATTRTDCQVIALNLCDKLENGVVVVVQT
THHIGIDDVIYSKIFQHLTHSIKMSLAFFIKKVQDRRRILYCHLVFFFLRVQDTKRIFLQ
ATLAILRQGLLERCQIVNQGLAVGCTALRISKSVEVQFDTLNTDFLQKMGCHNDCFHIGS
WIARTKTLNTNLVELAQAPCLWTLITEHRSHVVELAWLLHFWGEEFIFHIGTDNGRSSFW
TEGNMTVTLVIKIVHFLGYDIRCISDRATDNLVMLKNRRAHFCIVIALENLTGKALNVLP
LSRFSR
>orf03260
(SEQ ID NO: 527)
MEQIGKVFRQLRESRNISLRQATGGQFSPSMLSRFETGQSELSVEKFLFALENISASVEE
ILFLARGFQYDTDSELRKEITDVLEPKNIAPLEDLYRREYQKHAHSHNKQKHILNAIMIK
SYMKSMDERVELTAEEGKVLHDYLFSTEIWGIYELNLFSVSSAFLSVSLFTRYVREMVRK
SDFLMEMSGNRNFFHTILLNGFLASIECEEFTNAYYFKRVIEEHEYKENETYFRIVYLWA
EGLLDSKQGRVKEGQKKMEDAVRIFEMLGCNKSAEYYRNTTEC
>orf03261
(SEQ ID NO: 528)
LIPYFLHFIIFFRKFIKNLPNCQNYEKIEDIYHVEGLL
>orf03263
(SEQ ID NO: 529)
MKIKGQTRKLAAGCSKHCFEVMDRTDEVSSKHCFEVVDRTDEVSNHTYGKATLT
>orf03266
(SEQ ID NO: 530)
VVPFSDTFKDRNQVDIFTIKISRCNSSTIGENSWDIHISNSNHRSRHVLVTATDSDEGIH
VVTTHSRLDGVRDDVTRC
>orf03275
(SEQ ID NO: 531)
MKKFSYPTRQTGEGVKYQSQMVRQWFLIRIFRLFSVA
>orf03297
(SEQ ID NO: 532)
VVLDHQNQLFEARFLEHTNPLTRIQLTRVKALRILLSSPPFLVIKGIRTEVDKSC
>orf03305
(SEQ ID NO: 533)
VQKLKKAIYKAHLKDSDDFRPETSTPNLFESCLKLCPCFLSS
>orf03306
(SEQ ID NO: 534)
MGALGYYEGFVPYVSNQYKNQAEEEDKPLSDKYIFEKILGKTYAAFKKDQINERVEKLGK
LKPITINYNGKSEVIDSKEKLQELMNKAVKDEVAQI
>orf03307
(SEQ ID NO: 535)
MMGDGMKEFQFERKQRFSLRKYAIGACSVLLGTSLFFAGMGAQPVQDTETSSALISSHYL
DEQDLSEKLKSELQWFELENKLLNLWEH
>orf03308
(SEQ ID NO: 536)
MKIKEQTRKLATGCSKHRFEVVDKTDEVSSKHCFEVADRTDEVSNIYTARRR
>orf03312
(SEQ ID NO: 537)
VNITKTSIIKAHTTKEDGIDHTFTRFNIMSIFYSTRKIFLDKLNSTNRQFLGYIISTRCY
QSFNSVSQSIHTSSSSQAFRFGKHEFRVINRDKSKAILVNHYHLNLAFFISNHIVNSDFC
RSSCRCIDSHNWQAFFSRLMKPFIILWFSTICSHDRNTTSCILWRTPAKTDDKVTAMFLQ
SSYPICDIFTSRVWLYIAKDDIFDSFCIQWF
>orf03318
(SEQ ID NO: 538)
MSQDEKLIREQICDVCHKMWQLGWVAANDGNVSVRLDEDTILATPTGISKSFITPEKLVK
LNLKGEILEAEGDYCPSSEIKMHIRCYEEREDVRSVVHAHPPIATGFALAHIPLDTYSLI
ESAIVVGAIPITPFGVPSTMEVPEAITPYLPDHDVMLLENHGALTVGSDVITAYYRMETL
ELVAKTTFHGRMLLSTKGIEEQEIARPTLERLFSMRENYKVTGRHPGYRKYNGDGSMKET
EK
>orf03320
(SEQ ID NO: 539)
MESKKIAKQILIATAVLTSFLGSNLVYADVVQSNSNNRASTETARVTGNNLEKLITKDKE
IDKEMTYLSDMDWSSATHGDIDKTKTVQKDAPFTTGNKGEHTKISLLTSDDKVKYFDKGI
GTVADSPSVISYDISGQGFEKFETYIGIDQSANSSRSDHAVVDRIEIEIDGKVVYSSSVT
NPEGFRYNTQAQFISVTIPQNAKKISLKSFAGEHTWGDEVVFADAKLIKTVSTQTITPDL
LNKGINGGVYLSDLEWVDATHGDDDKSKTVQKDKPFTPGNNGSNNKIKLLIDGKEVEFNK
GLGTVASNPSSIKYDVSGANVTRFISYVGIDRSANHLNSDYADIQKFEVVADGKVIYSSD
SKYPKGIKYDTSAFLVDVEIPKDTQTIELKSYSGKHTWADELVLGGALFMANGKFKNPND
WSEVDKRREINNEHPLLMMPLYANGEEFNQGKYTFWGGDTLTGKWENIPDDLKPYTVIQL
HPDDLPKRDGAARDFYEHMLEEAAKYVNPKTGKNEPIPVILTVYTAGNMPYYTSAHWLST
SWIDKMYQKYPNLHGIFSTENYWIWANDIENKAADYLKVSAKNGGYFIWAEQNNGSAIEK
AFGKNGKIAFQKSVDKYWKNLIFMFKNTPAAEGNDSTTESYMKGLWLSNHTYQWGGLMDT
WKWYETGKWKLFASGNIGKSQGDRQWLTEPESMLGEEALGVYLNGGVVYNFEHPAYTYGV
NNKESLLFSEVIKEFFRYVIAHPAPSKEKVLEDTKVFIHGDYSNKGNGKFFVNVNTDREQ
TPLYMTGRYNVIPAIPGVLKTDKLKESVSSSRIQIKEITSPEFSSTQARKEYLNKLYPMN
YEGDIFAQKLDNRWFVYNYKVNENVKQTGKLKFNSLEMNVEFEPHTYGIFERISNGLKVN
LNNFRTNKDSLWSNAQDANQAKKLPQLTKKGAIKWIEEHYIKDTQFGEKRVTKIVLRGID
KLPTIHSLSGTNNSYDQPSLNFDQKNHMVTITINSNGNLEFELHF
>orf03322
(SEQ ID NO: 540)
MTIYINKDETVFHLAMKDSSYIFRILENGELQHLHFGKRIHVKENYNQLMAYKKRGFEVS
FSEEFEDIQQSMIQNEYSSYGKGDFRHPAFQVQGMNGSRITTLKYQGFELEKGKNRLNSL
PSTFDDIGQCAETLTIILTDSILDLTVRLNYTIFPEYNVLVRNTEFLNNSNNKLTLLKAM
SLQLDLPDSQYDFIQFSGAWLRERQLYRTSLRPGIQAIDSLRYSSSPQQNPFFMLSRRET
TEHSGEVYGFNFIYSGNFQNMIEVDHFDTARVTVGINPVEFRFLLNPAESFVTPEAIVIY
SDQGMNQMSQQLSDFYRHHLVNPNFSQASRPIILNSWETFYFDLGTEKILDLAKAAKDLG
IELFVLDDGWFGHRKDDKSSLGDWVTDRSRLPEGIGFLADEIHKIGLQFGLWFEPEMISI
DSDLYKNHADWTIHLLDREKSVGRNQYVLDLTRQEVVDYLFDSISKIIIKTNLDYIKWDM
NRHITDIYSIELDSEQQMEFGHRYILGLYQLLDRLITKFPSVLFESCSSGGGRFDLGLMY
YAPQAWTSDDTDPIERLKIQHGTSYGYSPSMMTAHVSISPNEQSGRQTSLDTRTNVAYFS
SFGYELDVTRLSVEEKEQVREQIQFYKKYRSLFQYGDFYRINSPFSCDSASWQVVSKDKC
QSILLYAQLNSKLNPGYTRVYFSGLDKDKCYSVSRFDEFFYGDELMNAGIKVSLSNLALC
VPEYLTKLFVIEEVVCKY
>orf03323
(SEQ ID NO: 541)
MKIENKNVRRNFFWGEGRFYTTDIVNKRAGVMIKNVSKEEFTITLENGIKLSSTHFSAIV
REEGDTRIQVSFVCPSIRLRLIFESRDDVLSKQLVLESSTEVIKSVEVESFEFETEDNIF
YPKRQDCIKEMANFSGYYVELGQPVYANSLFLGMEFPMSENKVDGRHYVSRYYLGTVVNQ
EKSLWSCIIGGACSYKKEEIQEAFFEYVEGIAQPSYFRKQYNSWYDHMTDITEEGILKSF
SEIRDGFENHGVHLDAYVVDDGWTNYQSVWEFNHKFPNGLRNIKYLVNGFGSSLGLWIGP
RGGYNGTEIIMSDWLEAHPELNIGSKNLISNDVNVADFNYLNQMKKKMLEYQKEFDISYW
KIDGWLLQPDKPDKSGPHGMYTMTAVYEFLIQLLIDLRKERGGKDCWLNLTSYVNPSPWF
LQWVNSLWIQISQDVGFTENAGNDINRMITYRDSQYQEFLEKREIQLPMWSLYNHEPIYA
VSANTWYMDHQMFASIPDFEAYLLFISTRGNAFWEFHYSFDMFDEERWKANARAVKWIEE
NYQTLKYSKKIGGSPEKFEIYGYKCHNQKTSTEILSLRNPAQIKQKIKIENLSIENFTRV
IGDFTIQEDEIELAPYSIVILKK
>orf03324
(SEQ ID NO: 542)
MKHTLETINSRIQWFREARFGMFIHWGLYSIPGKGEWIRSHQKLSIEDYEPYFRAFDPKE
YNPREWAKQAKAAGMKYMVLTAKHHDGFCLFDSKFTDYKATNTPAGRDLVKEFVDAVRAE
GLKVGLYFSLIDWHHPDFPKYADLNHPMRGNEVYRDEKINFDSYLEYLHNQVKEIVTGYG
QIDILWFDYSYEDMVGEKWGASKLIDMVRHYQPNVIVDNRLETSGEGFGSIVTDEITSYA
GDFVSPEQIVPHEGIRNFKGEPVPWELCLTMNNNWAYNPTDYLYKSSQTLIRKLVECVSK
NGNMILNVGPDALGRINDSSKKILDNFHRWMSRNGEAIYGCSGDENLPKPDWGYYTRNGN
TVYAHVFEQPIGPLALLGISKENVKRMSFLHDGSEVKISESWTTNAYKGICFAQFGEVPH
FTYPLPDLIDSVIKIELRE
>orf03325
(SEQ ID NO: 543)
MNTHINGISKKGKVLIYGYMLLTILISIFPIAWIFLSSLKADPMKNPGISLPTDFTLEGY
INVFTKLHVFTYFWNSFKVVSISVIISIVMISMSSYVIARMEFRGKKLVTSMLYSTLFIP
ATAMTFPVYRLVNELGIYNTPVALILVYSCSGIAMSFFIIKNYFEIIPKELEEAAEIDGA
TYAQTFWKVMLPIARPGILTAAVLAFINNWNEYYWASMLVIDKNELTVPALLGQFTTSFN
TNYNGLFSAIVVIVLPPIILFAFTSKYFIEALGGGAVKG
>orf03326
(SEQ ID NO: 544)
MAQKIMSLQNRKNQKRRFIFLFLLPTLICFFLFYFYSVVTIFLTSFAKWDYTNLNTPEFL
GFDKLFENYRYVFKEYPFFTEALINSVRWAVIGVIIQVPLAVSVAITLSKKLKGWKISRN
LYIVPSIISSAAMGLIFLQIYNPNYGVVNQIIHLFNPSFKDSVLLTPGLNIVAMTGAYIF
FAGASTIMILGQIFAIPEEVQEAAILDNITGWRKEWYITIPMIKGTIKTVSIMAATSGFL
LYNEVFFLTNGAAGTKSISFVIRELAVASSRTQYARANTIGVIQILGGMLIIVCINILFR
ERKRLKGEK
>orf03327
(SEQ ID NO: 545)
MNKKSLLKCAVIGLVATFGLAACGTSKDASGGSSSGKEVLEFYHGYHHSEDEWPVAKTMR
DLYDKFAEEHKDSGVEFKPTPVNGDLKDIMNNKVASGEFPDVIDLAGNAVSLAAIEQKLV
LDLKPYIDSNKLEKNVGLNYKQNQKDGKIYTVHEQLFTMGLWYNKDIFAKAGAKTPDQWN
TWDDFTQAMASIRKQDGVYAFGAGEPSIRLFNTVLGTTENGRKLLDKPLTKEGIESKEFA
DALKMVMKEIQANGSKNAGGDANAYSKDFQEGKSAVFFNGVWASGEMSKNPSLAPGIYPA
GVAISSSGGGITISSKMSEAKQKLALEFLKYMTSDDVQKVIFEKVGANPSNENVNVKELS
EKSSEATTKILGQAITQVKNAKAVVPTVSDVWGGDVHTAIINALTESAAENVDVDQKVKS
TQDVLKSLIG
>orf03337
(SEQ ID NO: 546)
MNIAIRIILNFFRVMGNHQNSLAMMMGAVVHEFVKFIFTSCIHPRCRLV
>orf03338
(SEQ ID NO: 547)
MLLIMSIQTTEPAFSRIATRLDKFIDRTWKTSIKTGNLLRKIGYSQFLTLRICL
>orf03339
(SEQ ID NO: 548)
LQNSKTGLDERRLSRSIFPSQGNKFPTINTIIDMFKNRLLIIIEGQILYRNISHYLISPT
KAVKNR
>orf03344
(SEQ ID NO: 549)
LTSLIPRLMFQKTSQLVSIKILLEGCWIIAIFTEPLR
>orf03352
(SEQ ID NO: 550)
MSNSFVKLLVSQLFANLADIFFRVTIIANIYIISKSVIATSLVPILIGISSFVASLLVPL
VTKRLALNRVLSLSQFGKTILLAILVGMFTVMQSVAPLVTYLFVVAISILDGFAAPVSYA
IVPRYATDLGKANSALSMTGEAAQLIGWGLGGLLFATIGLLPTTFIILVLYIISSFLMLF
LPNAEVEVLESETNLEILLKGWKLVARNPRLRLFVSANLLEIFSNTIWVSSIILVFVTEL
LNKTESYWGYSNTAYSIGIIISGLIAFRLSEKFLAAKWESILFPLVAMAIVTLTILYFPN
AQMFLLFSALVGMLSQLKEVPESVFLQETVEENHLVNVYSVLEVISTLAFSVFVLLMSYI
TDFGYQPFV
>orf03353
(SEQ ID NO: 551)
MSKLLDKILSRENMLEAYNQVKSNKGSAGIDGMTIEEMDNYLRQNWRLTKELIKQRKYKP
QPVLRVEIPKPDGGIRQLGIPTVMDRMIQQAIVQVISPICEPHFSDTSYGFRPNRSCEKA
IMKFLEYLNDGYEWIVDIDLEKFFDTVPQDRLMSLVHNIIEDGDTESLIRKYLHSGIIIN
GQRHKTLVGTPQGGNLSPLLSNVMLNELDKELEKRGLRFVRYADDCVITVGSEAAAKRVM
YSASRFIEKRLGLKVNMTKAKITRPGELKYLGFGFWKSSDGWKSRPHQDSVRRFKLKLKK
LTQRKWSIDLTRRIEQLNLSIRGWINYFSLGNMKRIVASIDERLRTRLRVIIWKQWKKKS
RRLWGLLKLGVPKWIADKVSGWGDHYQLVAQKSVLKRAISKPVLEKRGLVSCLDYYLERH
ALKVS
>orf03357
(SEQ ID NO: 552)
MFLRCATFKLADSRLNIFTCFFFGEIRFNSRNQVVKAFITDGTVISTIIVRGTVPCNQWT
KTCPAAFDIINGDVGFWKAVVDNAK
>orf03358
(SEQ ID NO: 553)
MLQITCVVCISCTKVSLVFTWENKDHTTVTQTCVKVNWL
>orf03359
(SEQ ID NO: 554)
LRSLIRQITYFITPRTCCINNQTGLDFKYLVCQEITSYNTCNLATFVKEEAFCLHVVGNE
GTVLVGTFDVFNHETRIVVTEVKIHSTSYQAFLLQVWLAFQDLILAQNLVRSWCVAHTC
>orf03360
(SEQ ID NO: 555)
LHFNQTSLKTASCRLQGYTSSCDSSTDNQEVQGAFLHFFN
>orf03375
(SEQ ID NO: 556)
LIHSKMFVKSIRLRKKRVWDKKILILGILYYKFLKSID
>orf03379
(SEQ ID NO: 557)
MFASKSERKVHYSIRKFSIGVASVAVASLVMGSVVHATENEGSTQAATFSNMANKSQTEQ
GEINIERDKAKTAVSEYKEKKVSEIYTKLERDRHKDTVDLVNKLQEIKNEYLNKIVESTS
KIEIQGLITTSRSKLDEAVSKYKKAPSSSSSSGSSTKPETPQPETSKPEVKPEPETPKPE
VKPEPETPKPEVKPEPETPKPEVKPEPETPKPEVKPEPETPKPEVKPEPETPKPEVKPEP
ETPKPEVKPEPETPKPEVKPEPETPKPEVKPEPETPKPEVKPEPETPKPEVKPEPETPKP
EVKPEPETPKPEVKPEPETPKPEVKPEPETPKPEVKPDNSKPQADDKKPSTPNNLSKDKQ
SSNQASTNENKKQGPATNKPKKSLPSTGSISNLALEIAGLLTLAGATILAKKRMK
>orf03384
(SEQ ID NO: 558)
MDREILKFFQDLLSILSHNDMITLFCQKCCNSFSNHFLVICN
>orf03386
(SEQ ID NO: 559)
MFITLRRICLRACVVEKEQSYLKFLFFQKRPVSFLHVKSVLAGI
>orf03387
(SEQ ID NO: 560)
MVKTTDRLEAIGFSFILFENLFKPCQLYLQPQNSVLSNLQLAA
>orf03393
(SEQ ID NO: 561)
MTRKLNPSYTNVASATTLTFNQVASTFRKACLDHVVNLTRNNLKGICQLTPLQLHDTRLI
>orf03421
(SEQ ID NO: 562)
VKAPIPKAPLAHSFGSASIIAHTIHQKFNLKVPNYRQEEDWTKMGLPITRKEISNWHIKT
SQYYLEPLYNLLRERLLTQPLLHADETSYRVLESDSQLTYYWTFLSGKAEKQGITLYHHV
LIDLFISYFNPL
>orf03430
(SEQ ID NO: 563)
LVSVFYSLLQVDNVDSVTFSKDVLSHLRIPATSLVTKVYTSLKKLFH
>orf03440
(SEQ ID NO: 564)
LIVWILKNHTDLTTYIPNIFLSQTLAINYNLSGFCFQ
>orf03441
(SEQ ID NO: 565)
MPYNRKPFSTFHVKRNILHIVVVLIFFIAKRKIFYINY
>orf03445
(SEQ ID NO: 566)
MFKKMSNSSRILFYISVNFCDKRIYRTKLYSDTPVNLFKFLFRQKSNCQSVGQTSSINHF
FYSWIVFFFKNNLCHSIPSIK
>orf03458
(SEQ ID NO: 567)
LADGSGKLAEGGTKLTSGLEDLQTGLASLGQGLGNASDQLKSVSTESKNAEILSNPLNLS
KTDNDQVPVNGIAIAPYMISVALFFAAISTNMIFAKLPSGRHPESRWAWLKS
>orf03464
(SEQ ID NO: 568)
MKNTVKLEQFVALKEKDLQKIKGGEMRLSKFFRDFILQRKK
>orf03483
(SEQ ID NO: 569)
LVEQLTFNQWVTGSSPVRVIYAGLAELADAPDLGSGA
>orf03487
(SEQ ID NO: 570)
LWVNIDHIRHISCENACLQYFTSIWYIDDFDLDLRVFLLKITSDFFQGFGHFFFLVEILD
GHCVIRRFTIVGASAEPKQS
>orf03496
(SEQ ID NO: 571)
MKIKEQTRKLAAGCSKHCFEVVDETDEVSNHTYGKATLTWFEEIFE
>orf03504
(SEQ ID NO: 572)
LIDVLFINSFIGRICFYCYRRIHATCLFLQLFSIVILNVAHTLKHSIFIVITFISRCRNF
IIVRILLENQFSRNQGIDNRVGQSRY
>orf03505
(SEQ ID NO: 573)
MINVNQVSIEVKNTFKNWNFTSSIELTTFSKFSQSPTMT
>orf03516
(SEQ ID NO: 574)
MGFSMKLIHDLDMHTTHSTAKMLYNVKAIKNDFSIRE
>orf03521
(SEQ ID NO: 575)
MYQDLLRKIAEEKPNYNQEEIQWLLDHLGDPSPEIRDDLVFTSFARGIQEELFTQEQFHF
IAEGVSSDGGLDKEIDKIGLPTLERSFRALIYATLLSDDANQQSVFYQELNAGFRNDLSN
QGLHYLSKEKDTTGFSSQYGWVHSFAHGADLLTEVVCHPEFPKNRVHEVFDILGQLFKRI
SIRFTDDEDWRLARVIYEPILQGKLEQEQVASWIKTVDFPIEAREDFYKFSNFRSCLGKS
XXIHSLIN
>orf03524
(SEQ ID NO: 576)
MGFKVSHFKIPSSHLSINVLRTIENFTEIGQGLLHISP
>orf03525
(SEQ ID NO: 577)
VGFFDFGLTNSCRQVRQFTQTVQDFLVCYHQGIVKEGQGYAGICFKFHPSLGNIGKFVIA
IVRRLRHKSIVANMAHLNVDLFQFRKGLLEILKSVKIALVITAKLVDVFTSFLDCTQEIL
TVLV
>orf03537
(SEQ ID NO: 578)
LKKAQWGFSNQGPDGLFLVRPTSNRDEIPPRDLAHPQNQLFLSFSQVEKLAWHAPSPLSE
FALNISLPLSSPPYLWPFIQSPVLYCASHFSIHFNSFSSHLRLVITISPHLLSSTSLLLH
TLCAQHTIHSTDLHHLRTPPPSGLFPLALYTRLAAPTLTYHTLSNIQSLKQQLVXXFIH
>orf03548
(SEQ ID NO: 579)
MANDNKSHYLIYRVLGISFEEGENIDLYQNKGRFLYKYAGSFLEEAAVLSFNEKFGTENT
>orf03553
(SEQ ID NO: 580)
MVNAMHFSFSILIEGNSRKVGICLLNRTHTRFKLSQAIYL
>orf03562
(SEQ ID NO: 581)
MSQQLSDFYRHHLVNPNFSQASRPIILNSWETFYFDLGTEKILDLAKAAKDLGIELFVLD
DGWFGHRKDDKSSLGDWVTDRSRLPEGIGFLADEIHKIGLQFGLWFEPEMISIDSDLYKN
HADWTIHLLDREKSVGRNQYVLDLTRQEVVDYLFDSISKIIIKTNLDYIKWDMNRHITDI
YSIELDSEQQMEFGHRYILGLYQLLDRLITKFPSY
>orf03572
(SEQ ID NO: 582)
VKEEKKAIVLGADNAYMDKVETTLKSLCVHHYNLKFYVFNDDLPREWFQLMEKRLETLNS
EIVNV
>orf03574
(SEQ ID NO: 583)
MKIKEQTRKLAAGCSKHCFEVVDRTDEVSSKHRFEVVDRTDEVSSKHRFEVADRTDEVSS
KHRFEVADRTDEVSSKHRFEVADRTDEVSSKHRFEVADRTDEVSSKHRFEVADRTDEVSN
IYTARRR
>orf03576
(SEQ ID NO: 584)
MEXXXFKAGAKFFWAKLGLESLEAKEILRDGGWDDIVKNRCIKREQPRLIEEA
>orf03588
(SEQ ID NO: 585)
MILLQNKSFCYSISQKETSLCHANVVTLNLHEALLNQISDNFSIKSSKRLSKFFLKSRHG
NPGFLAESQEHFFFHLLLLTQVIFCNTSIAFLNRTEIMTNGTMIFIAYSIDITRCPCTNT
IVFSIVPVHEIMTTFKAGFGEIRNLIMLKTRSLQLCNDVLKHLRF
>orf03612
(SEQ ID NO: 586)
MDREILKFFQDLLSILSHNDMITLFCQKCCNSFSNHFLVICN
>orf03614
(SEQ ID NO: 587)
MEDHLLINAVDEFRSISFFQFFKHAFFHIFLVKTNILSPKTNSLIITKGSRTTCFFFACQ
IRSSWYLKNQTNIQ
>orf03620
(SEQ ID NO: 588)
LFIRKKHTWINLTPKQTIFSQMNAQFFINFTRRALKRTFITFTSPTWQFPHIGPGNACLI
IT
>orf03637
(SEQ ID NO: 589)
LNIAYTDNPAHIFGKIFHDNLLALLIIFDDVTCKACLRQDKVNSGLFLDSLFNSGCKGVG
FSLVRLVISI
>orf03641
(SEQ ID NO: 590)
MCELDILHDSLYQFCPELHLKRLNSLTLACHALLDCKTLTLTELGRNLPTKARTKHNIKR
IDRLLGNRHLHKERLAVYRWHASFICSGNTMPIVLVDWSDIREQKRLMVLRASVALHGRS
VTLYEKAFPLSEQCSKKAHDQFLADLASILPSNTTPLIVSDAGFKVPWYKSVEKLGWYWL
SRVRGKVQYADLGAENWKPISNLHDMSSSHSKTLGYKRLIKSNPISCQILLYKSRSKGRK
NQRSTRTHCHHPSPKIYSASAKEPWVLATNLPVEIRTPKQLVNIYSKRMQIEETFRDLKS
PAYGLGLRHSRTSSSERFDIMLLIALMLQLTCWLAGVHAQKQGWDKHFQANTVRNRNVLS
TVRLGMEVLRHSGYTITREDLLVAATLLAQNLFTHGYALGKL
>orf03644
(SEQ ID NO: 591)
MXXTKSSCLITTGRNDSPSTCLPRVASNNDRFSSEFRIIPDFHCSKKGIHVNMDDFS
>orf03650
(SEQ ID NO: 592)
MHFHIIKLVNHFQLLIKLNRISHPNLHIKSSFLSLVLLFYQKEQDFAIMVI
>orf03660
(SEQ ID NO: 593)
MDRGESLSDCVCMAGYEPANSSRLSIEGTYENKLYKLISSKYHTTGNDIMVCVPCGYTKY
KETPGPHACTSCPGRTHAASTTNTNQDQCNRCPPGYYETNDPSYPCDVCSPNHICVGSDP
MDPALMLYSGKRIKCDKNSVTLVPFEENVHLASCLCDKGYMARTRTGIVKCEAVPKNTYK
DVVGNVGPTNCPPGSYTLKIGATDVSECVCKRGMFFDKDNKRCTVCPVGMYCLGGRLPNG
EHMLPMMCTDGNAVTKDGGATSPGECLCKPGFYLRQDGPGGCVECPENTYKSFISNENCS
PCPRIL
>orf03667
(SEQ ID NO: 594)
MXXAFCLPVFAHPETLVKVKDAEDQLGARVGYIELDLNSGKILESLRPEERFPMMSTFKV
LLCGAVLSRIDAGQEQLGRRIHYSQNDLVEYSPVTEKHLTDGMTVRELCSAAITMSDNTA
ANLLLATIGGPKELTAFLHNMGDHVTRLDRWEPELNEAIPNDERDTTMPVAMATTLRKLL
TGELLTLASRQQLIDWMEADKVAGPLLRSALPAGWFIADKSGAGERGSRGIIAALGPDGK
PSRIVVIYTTGSQATMDERNRQIAEIGASLIKHW
>orf03668
(SEQ ID NO: 595)
MARFIRSQTLTLLEKLNELDADEQADICESLHDHADELYRSCLARFGDDGENL
>orf03669
(SEQ ID NO: 596)
MTVRELCSAAITMSDNTAANLLLTTIGGPKELTAFLHNMGDHVTRLDRWEPELNEAIPND
ERDTTMPVAMATTLRKLLTGELLTLASRQQLIDWMEADKVAGSLLRSALPAGWFIADKSG
AGERGSRGIIAALGPDGKPSRIVVIYTTGSQATMDERNRQIAEIGASLIKHW
>orf03673
(SEQ ID NO: 597)
MKIHKTVNPVAYENTYYLEGDKHLIVVDPGSHWEAIRQTIEKINKPICAILLTPAHYDHI
MSLDLVRETFGNPPVYIAESETQLAPKPLPNNPLGPPXHSFIN

[0421] In some embodiments, preferred OXC141 antigens are selected from the polypeptides orf00045 (SEQ ID NO: 53), orf00068 (SEQ ID NO: 65), orf00074 (SEQ ID NO: 70), orf00223 (SEQ ID NO: 99), orf00229 (SEQ ID NO: 104), orf00360 (SEQ ID NO: 117), orf00506 (SEQ ID NO: 135), orf00781 (SEQ ID NO: 177), orf00785 (SEQ ID NO: 178), orf01068 (SEQ ID NO: 198), orf01446 (SEQ ID NO: 235), orf01447 (SEQ ID NO: 236), orf01449 (SEQ ID NO: 237), orf01455 (SEQ ID NO: 242), orf01460 (SEQ ID NO: 247), orf01461 (SEQ ID NO: 248), orf01463 (SEQ ID NO: 250), orf01464 (SEQ ID NO: 251), orf01466 (SEQ ID NO: 252), orf01467 (SEQ ID NO: 253), orf02661 (SEQ ID NO: 433), orf02690 (SEQ ID NO: 439), orf02698 (SEQ ID NO: 444), orf03318 (SEQ ID NO: 538), orf03320 (SEQ ID NO: 539), orf03322 (SEQ ID NO: 540), orf03323 (SEQ ID NO: 541), orf03324 (SEQ ID NO: 542), orf03325 (SEQ ID NO: 543), orf03326 (SEQ ID NO: 544), orf03327 (SEQ ID NO: 545), orf03562 (SEQ ID NO: 581), orf03660 (SEQ ID NO: 593), and immunogenic fragments thereof.

6. Sequences Identified from INV200
>orf00004
(SEQ ID NO: 598)
LKGVDDFLFIFEEGFKQGGKARADRDYSGVSSLRNSSKVYLEFLY
>orf00005
(SEQ ID NO: 599)
LCSALKNSYDIELIKVLSNKAHLYLPIETVTPQTVSTS
>orf00006
(SEQ ID NO: 600)
MRVAETSIVKKNHQIPCIINQKIAQKLIKKTSMTDIDHQLSISTSTVIRKINDFHFEHDF
SRLPEIMS
>orf00010
(SEQ ID NO: 601)
MFKSNLSLSQSLPHKDFFFFKRIIHLFSLFLLIDFIIIS
>orf00015
(SEQ ID NO: 602)
VEEVEVAEVKNARVSLTGEKTKPMKLAEVTSINVNRTKTEMEEFNRVLGGGVVPGSLVLI
GGDPGIGKSTLLLQVSTQLSQVGTVLYISGEESAQQIKLRAERLGDIDSEFYLYAETNMQ
SVRAEVERIQPDFLIIDSIQTIMSPEISGVQGSVSQVREVTAELMQLAKTNNIAIFIVGH
VTKEGTLAGPRMLEHMVDTVLYFEGERHHTFRILRAVKNRFGSTNEIGIFEMQSGGLVEV
LNPSQVFLEERLDGATGSSIVVTMEGTRPILAEVQALVTPTMFGNAKRTTTGLDFNRASL
IMAVLEKRAGLLLQNQDAYLKSAGGVKLDEPAIDLAVAVAIASSYKDKPTNPQECFVGEL
GLTGEIRRVNRIEQRINEAAKLGFTKIYVPKNSLTGITLPKEIQVIGVTTIQEVLKKVFA
>orf00018
(SEQ ID NO: 603)
MGVSIFLALFYMIPALYFLFRIGKKWELPKKVLILSLLGGMFLSGWLSSFANTYIHDFMN
CTPKVRQKKSNFWGVLL
>orf00019
(SEQ ID NO: 604)
MKLSYEDKVQIYELRKQGQSFKQLSKRFGVDVSGLKYMVKLIDRYGIEIVKKGKNRHYSS
KLKQEMMDKALLEGCSQRSISLDYALPNQGMLSFWPAQYKKNGYTIVEKTRGRPAKMGRK
RKKTWEEMTELERLQEENERLRTEVAYLKKLKELEERDEALERERQRQLEKWFQEDFD
>orf00020
(SEQ ID NO: 605)
MVSGGFRLDFLLETARLARSTYYYQLKQLDGVDKDKEIKTEIQGIDNEHKGNYGYRRIHL
ELRNRGFVVNHKKVQRLMRILGLTARIRRKRKYSSYQGEIGKKAENLIQRQFEASRPMEK
CYTDVTEFAIPNSTQKLYLSPVLDGFNSEIIAYHLSTSPNLEQVKSMLEQAFTEKYYENT
ILHSDQGWQYQHDSYHRFLESKGIQASMSRKGNSPDNSMMESFFGILKSEMFYGYEKNFR
SLENLEQAIVDYIDYYNNKRIKVKLKGLSSVQYRTKSFG
>orf00024
(SEQ ID NO: 606)
VNIATLQNGHILGWQIQHIANKLTSNFWIAKDFLSYQVIGWANARMTYSHISSLFIISQF
>orf00026
(SEQ ID NO: 607)
VSITFSLTNFFKILINLTAQVSPQVIDEKILMMDLNLNNYLSTVIQLRQDVYTGIKILHR
VRHGE
>orf00027
(SEQ ID NO: 608)
MSRYSYSLDSRKIVFEISCFKEKKASLTLFFHLFESSIMKLATQPSYSSFYSELK
>orf00033
(SEQ ID NO: 609)
MKIKEQTRKLAAGCSKHCFEVVDRTDEVSSKHRFEVADRTDEVSSKHRFEVADRTDEVSS
KHRFEVADRTDEVSSKHRFEVADRTDEVSSKHRFEVADRTDEVSSKHRFEVADRTDEVSN
IYLRQGDVDVVEEIFEEY
>orf00034
(SEQ ID NO: 610)
MKPGAEGWKDERSQDIEEKDNGDGLGYFLFLSMDNRRCRCNGRTPTDRRTYSNQGSQFCI
QGKEALEEVGNNQGY
>orf00035
(SEQ ID NO: 611)
LPNCEDLRDIETKTKQDNGILEQFLGTKGQSNIQLFIRREKGM
>orf00044
(SEQ ID NO: 612)
LSLLDLRGSLCLRIYLHEPLITTVSQDFTSLSDISHF
>orf00047
(SEQ ID NO: 613)
MDFKSFIIGLVVGIFGPYMDDLIRKKFLKSSEKKTEKSVKK
>orf00093
(SEQ ID NO: 614)
MTYEYKSHIYLAETVLNVKDLASQTTFYQQVIGLEILSQTETESILGLGGKVLVQLIQAQ
ESGEVREHXXXFHSLIN
>orf00103
(SEQ ID NO: 615)
MVSNLVFIGNCNFHNTVIFHLLNRLNQGPLQILSQNHDKGRRLSWIFKSRLGQLNASKNW
MGRKEQAMALAIAADLQDQLLFKKAD
>orf00113
(SEQ ID NO: 616)
MKFNPNQRYTRWSIRRLSVGVASVVVASGFFVLVGQPSSVRADGLNPTPGQVLPEETSGT
KEGDLSEKPGDTVLTQAKPEGVTGNTNSLPTPTERTEVSEETSPSSLDTLFEKDEEAQKN
PELTDVLKETVDTADVDGTQASPAETTPEQVKGGVKENTKDSIDVPAAYLEKAEGKGPFT
AGVNQVIPYELFAGDGMLTRLLLKASDNAPWSDNGTAKNPALPPLEGLTKGKYFYEVDLN
GNTVGKQGQALIDQLRANGTQTYKATVKVYGNKDGKADLTNLVATKNVDININGLVAKET
VEKAVKDNVKDSIDVPAAYLEKAKGEGPFTAGVNHVIPYELFAGDGMLTRLLLKASDKAP
WSDNGEAKNPALSPLGENVKTKGQYFYQVALDGNVAGKEKQALIDQFRANGTQTYSATVN
VYGNKDGKPDLDNIVATKKVTININGLISKETVQKAVADNVKDSIDVPAAYLEKAKGEGP
FTAGVNHVIPYELFAGDGMLTRLLLKASDKAPWSDNGDAKNPALSPLGENVKTKGQYFYQ
LALDGNVAGKEKQALIDQFRANGTQTYSATVNVYGNKDGKPDLDNIVATKKVTININGLI
SKETVQKAVADNVKDSIDVPAAYLEKAKGEGPFTAGVNHVIPYELFAGDGMLTRLLLKAS
DKAPWSDNGDAKNPALSPLGENVKTKGQYFYQLALDGNVAGKEKQALIDQFRANGTQTYS
ATVNVYGNKDGKPDLDNIVATKKVTININGLISKETVQKAVADNVKDSIDVPAAYLEKAK
GEGPFTAGVNHVIPYELFAGDGMLTRLLLKASDKAPWSDNGEAKNPALSPLGENVKTKGQ
YFYQVALDGNVAGKEKQALIDQFRANGTQTYSATVNVYGNKDGKPDLDNIVATKKVTIKI
NVKETSDTANGSLSPSNSGSGVTPMNHNHATGTTDSMPADTMTSSTNTMAGENMAASANK
MSDTMMSEDKAMLPNTGETQTSMASIGFLGLALAGLLGGLGLKNKKEEN
>orf00118
(SEQ ID NO: 617)
MSLQIKLKKLAKELSKLLKDSNLETVDKDVLENSQKELQKAVLFLADEKGSEHTEAEVID
NLKEVIAKLKANA
>orf00129
(SEQ ID NO: 618)
VGRFFGSSQTSDEFFFSFDSSIVKELSEIVHGFDTVSFR
>orf00140
(SEQ ID NO: 619)
MKIKEQTRKLAAGCSKHCFEVADRTDEVSSKHCFKVVDGTDEVSSKHCFEVVDRTDEVSS
KHCFEVVDRTDEVSNHIRQGDVDVV
>orf00146
(SEQ ID NO: 620)
MNDDDSRCIHIERDGKTIEFGYLNISSTDRNTSHADGLVGIFNSNFSGVRVRGIAVFLNG
PDNLDTTLVGNFQTIWNFRIICIHS
>orf00147
(SEQ ID NO: 621)
LEFNFCRSIIKNGRDNLPNTNSTSGMATRWANHNWSDDIKDRLKTK
>orf00152
(SEQ ID NO: 622)
MSCNCAFYRSQFFDVNSVSNYHSHQKELRFPNSILFTYFVKVA
>orf00156
(SEQ ID NO: 623)
MSKEKVILAYSGGLDTSVAITWLKKDYDVVAVCMDVGEGKDLDFIHDKALKVGAVESYVI
DVKDEFATDYVLVALQSHAYYEQKYPLVSALSRPLISKKLVEIAHQIGATTIAHGCTGKG
NDQVEYQIAVAKKANEAKK
>orf00157
(SEQ ID NO: 624)
MRYDFGKVYKEIRESKGLTQEEVCGGVLSRTSLSKIESGKTTPKYENMEFLLRQINMSFE
EFEYICQLYQPSQRTEIMQTYLNMRSIIGTSDLVNLFQKCQDYLKTHHDLPIEEIRDMLE
VVIYIRQHGAGELSDHAEQVVKKLWRKIEKQDTWYESDLKILNTILFSFPIEYLHLITGK
ILQRLEVYKNYQHLYDLRIAILLNLSTLYLYNQDKNMCKQICYTLLEDAKNKKSYDRLAI
CYVRIGICTDDSKLIQKGFSLLELTEETSMLSHLKKEVEIYYQAKER
>orf00158
(SEQ ID NO: 625)
MKIREIIGTDMYGTTVSGIVSGLNKLNFTVKAVRVALEDLTPKLTFPAILQVKNDLGQNH
FVVLHSIKEKINGTRITK
>orf00159
(SEQ ID NO: 626)
MELVLPNNYVVIDEEEMMYLDGGAIYIPRWAITGAITGAAYAALAAAGGGGLQLVLASYG
LRSALVAGIVKGLGVLGIHIGNAFANTVIRSIASAGIGAGADWIFTNIIDGWDGRRDNQL
RIG
>orf00161
(SEQ ID NO: 627)
MATITNALNIAATVAEVFSLGGAIAYGLDIVDGKFDGYLWA
>orf00162
(SEQ ID NO: 628)
MKDDQKYLLAGLYSLLVAIFYFPLIESKGIFVSILMAVLLLYLIYFIATVIHIVIIKFIR
KKSFKYLVLYPFTYDGSWRFQPINLLYFPEMVRDVIPINLVQEYCQGQPYGLLKKMLKRI
RLSREIALLLATIIVYFFTHRILPLSVFTFMFSYILLFVQSYLGSNTAWIGNRRLIIDDE
FEKILLSKSYIKEISSARYSEYLTCEYKNPTPIILIAIFENLLDSYLLQNQSEVDLDIFY
KVLPLLYKEKYTMGFNYFVSLNYLLYKVGFLGIIYDNEALRDLSKQYLNKNISELQDGSF
EGGIQDAVASKQIVVINEFIACLNSKCMPSQYDRFFYKDRPYIFSRKSSIKG
>orf00163
(SEQ ID NO: 629)
MKNKRYFFDTILIILLLISTIFCVSPVFIKLDILGTPSHAILTFVLAIPLFYILSQCLHT
LLLLVSSIFCKLRPIYFYFIFVIIIGARKYYRILFHQLMGFSPGIAVFYKESQTTKNLFK
FYYFLYFTTLISYYFFFTFVYDKSLLLPLIPFSIIIALVQKLYRIENQQLFLLKSKVLTI
LESKRDCEFNLQDYHEIWKLQSKSELPCVALSYISLIKPYLSESVREQIDLLEVKRFKKI
NHPISLYGMLDVIKLNLYLRHYNEKNKYESMLNKILEVRPDFVLIEQNIDDSLNSSQPLS
LSLAISEIQLLLEVYIGIKHVSIRR
>orf00164
(SEQ ID NO: 630)
MIRKPIIFLLMLPIWGLWIELHLLVSNLQLNLEIPFDFVVSTSLTFFVLILSKIVLDILY
ALKDLYKKEALITIFPFIFIGRKKVNVRFSPYFSFHRKSLSPDDLRSRIIWSFILEIAII
LVFILKIPFAIIMLTTIFFWTIMDINHLVFNKTEFLFNQNKWQKEDSFESDLTKTLKDKI
QKSELSYSDLMSLQLYDAMNQSTFLTDSELFEDILKKIEDSHNTLLCTGLVELLLYEISI
SNNNNWQEKVDKIRIQLIRINQLDFFYYTSWLRQNFDFCMNREYHKMKSRKLLLSNKKIV
>orf00165
(SEQ ID NO: 631)
MELVLPNNYVVIDEEEMMYFDGGAYLSKRACQGICAALAMSSGTFIALAGAAVLTKKLIN
YIKVGGLGGWLIGAAAGKIAYYIGYGVLNRGCDINGNPYPWDGFISATVR
>orf00166
(SEQ ID NO: 632)
MSNVDKIRKIHIIVCWVYIFLSFRAIINDTEYFLLIFLAFIYSIVSLPLYSVKNKIVSIC
LAINSILLMSFPILINKFFPESFLTYTVLISVFITELIIFHLIGKDFDIKLTNEYKKISQ
FRSKVSQSPWIKYLEISSFILTIFPSILYGTVDNHVLTLIFLIKICVDTTIKFLFIRLFD
TSTLMKRRIFFLFALDVIAYLFLGYLLVIQKAGYLFSVLLLFSNFSVPFIKEKEYELFKN
SK
>orf00167
(SEQ ID NO: 633)
LFNEIKKTSSLIGNVFIGMKEDDAMFKKRIEKGKSSVFIFLE
>orf00168
(SEQ ID NO: 634)
MNKKKMILTSLASVAILGAGFVTSQPTFVRAEEAPVASQSKAEKDYDTAKRDAENAKKAL
EEAKRAQKKYEDDQKKTEEKAKEEKQASEAEQKANLQYQLKLREYIQKTGDRSKIQKEME
EAEKKHKNAKAEFDKVRGKVIPSAEELKETRRKAEEAKAKEAELTKKVEEAEKKVTEAKQ
KLDAERAKEVALQAKIAELENQVHRLETELKEIDESDSEDYVKEGLRVPLQSELDVKQAK
LSKLEELSDKIDELDAEIAKLEKDVEDFKNSDGEYSALYLEAAEKDLVAKKAELEKTEAD
LKKAVNEPEKPAEEPENPAPAPKPAPAPQPEKPAPAPAPKPEKSADQQAEEDYARRSEEE
YNRLTQQQPPKAEKPAPAPVPKPEQPAPAPKTGWKQENGMWYFYNTDGSMATGWLQNNGS
WYYLNSNGAMATGWLQYNGSWYYLNANGAMATGWAKVNGSWYYLNANGAMATGWLQYNGS
WYYLNASGAMATGWAKVNGSWYYLNANGSMATGWLQYNGSWYYLNANGAMATGWAKVNGS
WYYLNANGSMATGWVKDGDTWYYLEASGAMKASQWFKVSDKWYYVNGLGALAVNTTVDGY
EVNANGEWV
>orf00190
(SEQ ID NO: 635)
LKKRMNRWQFLLNQSKEMVGILLLKMKEQELIEFVVNL
>orf00191
(SEQ ID NO: 636)
LIKVIKRKAFGFRNFNNFKKRILMTLNIKKESTNFVLSRL
>orf00195
(SEQ ID NO: 637)
MTYNEKRLTNSLERVHMEQLKNTTDLLGLEDKNIKILSVLKYQTHLVVQAKLDSPAPPCP
HCQGKMIKYDFQKASKIPLLDCQGLPTVLHLKKRRFQCKNCLKVVVSQTSIVKKNCQISN
MVRQKIAQLLLEKQSMTEIAHRLAVSTSTVIRKLREFKFETDWTKLPKVMSWDEYSFKKS
KMSFIAQDFESKSILAILDGRTHAVIRNHFQRYQREVRELVEVITMDMYSPYYRLAKQLF
PKAKIVLDRFHIV
>orf00196
(SEQ ID NO: 638)
MGYSLKKSRTYCEQDPEKVNRFLKELNHLSYLTPIYIYETGVETYFYLEYDRALSRQLVS
LEEDIII
>orf00201
(SEQ ID NO: 639)
MRFYCEAYEVITEEKNVYFNDIELEVKYSSVEELFIICEKLLDKKKVSFFYVDEKPLRYL
LFDYIFLLVLAKKNIPILDGVSNKQVDPTLLHHFSLEIEKNFIDFCYKNMDLILKTQSIS
LCHREELIIVDVSDDSKFGVFYKRFRTLVDKNNGKYVCVYNFSRVSDILQNWKNYCNRKF
SVTFTESQFELFKLLYNQKNFKTISLLFGKKIVAGGIIYYSDLTNIEYFCIFWWDSMFGK
DSIGKYVYVEEISRCHFLDRNYSFCYGLQDYKSKLIKYFLE
>orf00202
(SEQ ID NO: 640)
METRNLISYSLTDIFETDKIRIELLGEIYYKNIKLELHEFAGLYKIYGISLIKNITGMFL
IIIFDTKTKELKIFQDITTSYFNLYYTVYGGVFYYSTSLKKVMKLSHVPVTLNNKKIQEF
MRNGFILDSNTLVTEINKLEYFSYISVNNTLRICGIDYNDSNNFTKEQVLKNWDSMLRES
ILRVYSEAGEANITLSSGFDSNYILYTLANYTNSSINAFCIGGEKGINEIPEVTKIAKFY
GINLLVDTVMSQDLEYFPDIVWRLEGSLFECGVILQYYLGRLLFQKGNTSILCGESADEI
MTFKYHSVNYNQFCNDKQKSVYFSYSDYPFYVTNSIVLKKNSLLLHSFGIHPRYPYKMSE
IVEMSKKISDLNDKKEFHKKNCELRFQDSVLDNINSVPGTTHLFSCLNIQTLVKIILYIF
RYNSCMKIFNFRDKELIFFNKIVNGLIQNIEENLEDDIERILKYLYICLFNEIFIIKNKV
NFFDDVEFNQTLSEFLDKL
>orf00204
(SEQ ID NO: 641)
MKFFCENNLNITFFDTFSEIKNNIDYYIIALPTDYDEKIGSFNTYEIEQTVSKILRVKPN
GKIILKSTVPIGFSNKLKRLFDTKNIIFVPEFLREGCSIYDNLYPSRIVVGDETVEGRKI
AELFLSISTHSTANIKNVMLVSPTEAEAIKLFSNTFLALRVAFFNELDSFAERRSLNAEV
VIKGVCLDPRIGNFYNNPSFGFGGYCLPKDTKQLKKEFIEINAPVIEAIDISNTNRKQFI
VKQILERKPKIVGIYKLGMKYNSDNYKESAILSIINELLIVGIKILVYEPNLNVSIDNVI
FEKNFELFTKQSDLIVANRWDRGLEAYKDKVYTRGIWIRD
>orf00206
(SEQ ID NO: 642)
LEEESFIMENTEFSLELDVTEVATEQDYVSSGVISTGCCKN
>orf00207
(SEQ ID NO: 643)
MFKIKDNYIYRQCVNDSILIEKLNENNLEIFFDSKIFQEMLMVANPRFFNELTKEKIYQN
STFRNYAKRSLTRATPFGLFSSVGVGSFSKVSYPQQIRENYSKKVSVSGEWISSLCMMLE
NEDSVLLQLHLQWNQKVLELSDKYQLNNINYWGVSEQSRDILIKKTALLEFIKKLTYKSE
VSVLDLVQEIQTKSPNLETQKIIDYLRNLIISEFLFTNLRKVVINHNCLDNLIYILSSIN
EQTKLTTDLLQLKSCIEKYSKSELGEGILQYAEICEKMSHIFNEEKQRYLKVDLVNSYDS
LLPKDLKKTLEDFVNFISRINLGKDYRNKELISYTEKFVEKYGEYVEVPIKQLLDSKLGL
GIPKQNLEPYSILSSVAEQTFLSYLSKEIFKAVKNNKKEIDISNIPPELLYPNLDRFAVN
QFELYCEMKNFGEQPVISIVPNTGSDMIGKSIGRFASYFLNSNIELDSRVDNVELIEFPS
DNKNLNVMSSHHGHSKKLLLSYEDDFDIDSLELDFLVVGVERVNEHYKLYFRDLRTDLIV
NFVTTSMLNHKSIGVFSHLARFLLTVSLEWQDNPFSLFRVIENLDFLPYIPRIKYKNIIL
SEEKWILSDVDKKDMSTISQWKKFFDVPSLLYFHKDDERLLIDLKNSLDVQWILKQNVDK
LHFTRFDKIDGKNCEFIFGFENPRNSVYPHSVSEKTVRRIENDFYKDYVKTFSSDWIYFK
LYGINSSTMPELRENLLIFTDELLAENLVSDFHFVNYNDGGDGSIRLRFKIMNEDDFEKL
RYRIIHWIDFLLNHYFCKDVSFNLYEREVERYGGIGFLTVCERIFSIDSYLVLKLFSKKV
LKVDDYLSVLHSIFIYIRLLGISPKQLLKLMKDTFTQNIYRKSFKKVFPNNAKVIKEFKQ
YFEDQSKFDIFNEVFKSFSPIEKHFEYKNDMIHSLLHMHMNRIGIFSLNEKEYLYFVRYI
LEVLNNYEKYN
>orf00208
(SEQ ID NO: 644)
MRNIIKKYDEIINKVDSLVLDNNIIDLLQRSCYTENRSYLSEYPSIIIYLSYRLANCDDN
EHSKLLYNRVNYYLHELLKSIKLNSRNNISMCYGFSGYVYALKLLPKRSKEYSKLLETLE
TILVSLTRDRLSEIKKSNKVKEEYIDVIQGVSSVGKYFLSKDKLTSNQELLLKGVLNYLA
GVINNKPTIYPEYMPNEKLKRKFPNGYINLGVAHGILGPLYVLALGFKKFNMPEYLISLK
KGLSYYEKTFQTNKIGKIIGWNGRVSAEVESEKFEYNLSWCYGSLGMARVLYNISKIIDI
PKLQELATDVFHSSIYYLNSSEILNNAICHGRSGIMLLFNLMYLDTGESQFKAISDNLFK
EIVNKATDSEYIFVERDIYFRGVNYDEVIEYIDFCLLNGVSGIVLALMAQRTGNASPLAE
MFFMQ
>orf00209
(SEQ ID NO: 645)
MKKILNNKLYMKVLVSDLISNFGDTLYFIALMTYVTEIKSSNLAISIVNISETIPILFTI
FFGIIADRTLNKVGMIIKTLWIRTILYLLVAVVMNFKESILVVILASIVNLISDTLGQFE
NGLFYPISNRIVKKSDREETMAFRQTATSTMNIVNQSLGAFLITFLSFFHLALINSLTFA
ISLLITLAIKSQINNFYIDKTPSTKVSKVDFKATFSDIISNLKLSLKHLFSLTNMKTVLL
VIPILNGSLAIIIPLAVVNLSKSSALTIISSATTISVLGISTVSGGILGGTLILISKKFK
NLSIENLLKMNLMTILLSFIAFYYQNIYFIVLTLFLSSVFVSALNPKIGAIIFNNLDETK
LATIFGGMVTYFQLGDVVSRLLFSTLVIYLSYTYIAVIYMILVLIVAIYTFRRVQTTS
>orf00213
(SEQ ID NO: 646)
MKIKEQTRKLAAGCSKHCFEVVDRTDEVSSKHCFEVVDRTDEVSNHTYGKVKLTWFEESF
EEYK
>orf00217
(SEQ ID NO: 647)
LKSSILSKMGDFSVRYCNLVGTVLFGVVLIAILRLVF
>orf00246
(SEQ ID NO: 648)
MGLDVGSKTVGVAISDPLGFTAQGLEIIQINEEQGQFGFDRVKELVDTYKVERFVVGLPK
NMNNTSGPRVEASQAYGAKLEEFFGLPVDYQDERLTTVAAERMLIEQADISRNKRKXXIP
FIN
>orf00270
(SEQ ID NO: 649)
LNTSYSFGKKDQFALEHCFCIKLSIFARAVTLFVSCIN
>orf00291
(SEQ ID NO: 650)
MLIGEGYRTFPVLIYTQFISEVGGNSAFAIMAIIIALAIFLIQKHIANRYSFSMNLLHPI
EPKKTTKGKMAAIYATVYGIIFISVLPQIYLIYTSFLKTSGMVFVKGYSPNSYKVAFNRM
GSAIFNTIRIPLIALVLVVLFATFISYLAVRKRNLFTNLIDSLSMVPYIVPGTVLGIAFI
SSFNTGLFGSGFLMITGTAFILIMSLSVRRLPYTIRSSVASLQQIAPSIEEAAESLGSSR
LNIFAKITTPMMLSGIISGAILSWVTMISKLSTSILLYNVKTRTMTVAIYTEILRGNYGV
AAALSTILTVLTVGSLLLFMKISKSNSITL
>orf00292
(SEQ ID NO: 651)
LIIIASMSAPFVGAYSWVLLLGRNEVITKFLTNALYLPAIDIY
>orf00293
(SEQ ID NO: 652)
MERKKLNIWTVSSFFLFLTYPIFLVYPIVTVLKQALIHEGQFSLANFVTFFSKAY
>orf00295
(SEQ ID NO: 653)
LLSTTEFIGLSIRILSNLHEFKILVGLLNQFFFWNLLLHKTKSNVVSDSQMWENSVVLEN
HPDIAFAGFHIIDFCIIEVKFSTFDTVETCNHTKKGRFPTS
>orf00314
(SEQ ID NO: 654)
MITIKKQEIVKLEDVLHLYQAVGWTNYTHQPEMLEQALSHSLVIYLALDGDAVVGLIRLV
GDGFSSVLVQDLIVLPIYQRQGIGSALMKEALEDYKDAYQVQLVTEETERTLGFYRSMGF
EILSTYNCIGMTWMNRKK
>orf00325
(SEQ ID NO: 655)
MKIKEQTRKLAAGCSKQCFEVVDRTNEVSNHTYGKATLTWFEEIFEEYNTNLEYKQPICS
QEKA
>orf00359
(SEQ ID NO: 656)
MVDNIPKRVNDVIRQAGNNAKTSRPHVGIGKSHISVSFLFPYHTANRIKNQEKVIF
>orf00375
(SEQ ID NO: 657)
LFDLLDHGLDTVLVCHVTDISMGLDANFTISFNPFIDQILIDIVKDNSSAGFSVGFGNSK
SNSIRSAGDESNFSF
>orf00387
(SEQ ID NO: 658)
MKSLARLLIIHVFISIFLFFALTSGAISHTVLLLLLLFLPALNKGLEKIQSKRIPVLNAA
LFFLLISFPQLLTNPVQWKFSIFLVVTIISSLAYFYNFYQVVKEVDQKQLI
>orf00390
(SEQ ID NO: 659)
LEAAGEIETEFQGWIVLVVFNHIDSLSRDTDILGEFELGNTQFLAKFFHTIHLISFLIYV
VYI
>orf00403
(SEQ ID NO: 660)
MEGVNHVDIIKVSCCSFISQVNWMMKGKIPNREGFKFSVARFDAIDLVVVHIGHTRCQFS
RTGSRSGYDNQVATGFDVVVFAHAFWGNDVIHIRRISFDWIMKIRINSVFLKLVAEGICS
GLASVLCNDNGTNKNP
>orf00404
(SEQ ID NO: 661)
MFNVASINGNHNLNLLFQFLQELDFVVRFITRKDTSSVEIF
>orf00409
(SEQ ID NO: 662)
MIDIHSHIVFDVDDGPKSREESKALLIESYRQGVRTIVSTSHRRKGMFETPEEKIAENFL
QVREIAKEVADDLVIAYGAEIYYTLDALEKLEKKEIPTLNDSRYALIEFSMHTSYRQIHT
GLSNILMLGITPVIAHIERYDALENNEKRVRELIDMGCYTQINSYHVSKPKFFGEKYKFM
KKRARYFLERDLVHVVASDMHNLDSRPPYMQQAYDIIAKKYGAKKAKELFVDNPRKIIMD
QLI
>orf00410
(SEQ ID NO: 663)
MKEQNTLEIDVLQLSRALWKRKLVILLVAIITSSVAFAYSTFVIKPEFTSTTRIYVVNRD
QGEKSGLTNQDLQAGSYLVKDYREIILSQDVLEEVVSDLKLDLTPKGLANKIKVTVPVDT
RIVSVSVNDRVPEEASRIANSLREVAAQKIISITRVSDVTTLEEARPAISPSSPNIKRNT
LIGFLAGVSGTSVIVFLLEFLNTRVKRPEDIENTLQMTLLGVVPNLSKLK
>orf00413
(SEQ ID NO: 664)
MDKKGLEIFLAVLQSIIVILLVYFLSFVRETELERSSMVILYLLHFFVFYFSSYGNKFFK
RGYLVEFNSTIRYIFFFAIAISVLNFFIAERFSISRRGMVYFLTLEGISLYLLNFLVKKY
WKHVFFNPKNSKKILLLTVTENIEKVLDKLLESDELSWKLVAVSVLDKSDFQHDKIPVIE
KEKIIEFATHEVVDEVFVDLPGESYDIGEIISKFETMGIDVTVNLNAFNKNLGRNKQIHE
IVGLNVVTFSTNFYKTSHVISKRILDICGATIGLILFAIASLVLVPLIRKDGGPAIFAQT
RIGKNGRHFTFYKFRSMRIDAEAIKEQLMDQNTMRGGMFKMDNDPRVTKIGRFIRKTSLD
ELPQFWNVFIGDMSLVGTRPPTVDEYDQYTPEQKRRLSFKPGITGLWQVSGRSKITDFDD
VVKLDVAYIDNWTIWKDIEILLKTVKVVFMRNGAK
>orf00414
(SEQ ID NO: 665)
VTFDKEDARSILENEIFYPCYYPTNRNLKNLIKNTILAFKILRKERPDIIVSSGAAVAVP
FFYLGKIFGAKTVYIEVFDRIDAPTMTGKLVYPVTDRFIVQWEEMKKVYPKAINLGGIF
>orf00415
(SEQ ID NO: 666)
MIFVTVGTHEQQFNRLIKEVDRLKGEGFIQDDVFIQTGYSNYVPKFCKWEKVISYEKMNQ
LIKESDIIITHGGPATFMAVIAKGKNPIIVPRLKKFGEHVNDHQMQFVKITKEIYNLIVI
DDISDLHLILHNFKDKHFETYLNNERFNVRFNVEISNLFHGNKINEN
>orf00416
(SEQ ID NO: 667)
MKIRIEPQYFLYKYLWFIILLPKQFMQLILFFLIALTLLPTYIKEKQVFKIDTPSFCMVL
WTIIYSISIIFNSLIDGLAVQVIFSDLSKAFNWLIAVFFYNYYLKMPINIDRIKRYMYYN
FTILVVFVGLFYIQRGSNVILFGRSLLDWDGFTLATSYGVRYTGFLEYATLNGQLILFLL
PLIRLFRFRFFTQTIIFAFLLEVLVLSKSRIAIVAMLIYIAFAVVNEINSNNKWLIGIFC
PIIPFMLFYNFEKIKQIFFQMFSSRSGSNATRFRVYEESLKAINGMEMLLGAGVRIPSTV
DILLGSHSMYISFIYRTGVLGSIIITVMFYYLFSKFLKCDSSERLRSIGYILALSVFWLF
EELDPHYWCLILFFSTISIFINNRKEEIVG
>orf00417
(SEQ ID NO: 668)
MIEVSIIIPIYNAEKTIKNCVDSALKQNLESLEVILVNDGSNDSTSKILEQYGDNPQVMI
FHQVNMGVSAARNVGLSYASGEYVFFLDSDDILDEGMLSKMYQFAKSNKIDLLSCWHKEP
STTQYGGNDNSSASFIARTKEEIGNHFVDIFPRSACAKLFLRRRIEENNIAFSTEMSLGE
DMSFVCQYLMVSRSIAVIDGLYYTIQNVNPQSLSKRYVSNIENSLLMQNQLWDQLLEVYP
KIEENYYKQHMDFRFYLASLYVNNLFKFDSPYSSKEKWDNIAQQLKKYRPFLDEKVSKEK
KPKNMNEMVIFYLLESKIPALIYSFYSFKEWWKKKRLKN
>orf00418
(SEQ ID NO: 669)
MEDLVSIVVPVYNVEKYLKKSIESILNQTYDNLEVLLVDDGSTDSSGEICDSFIKVDSRI
RVFHKENGGLSDARNFGIEHMKGQYVSFIDGDDYISKDYVWKLYHSLKNNNSEVSICSFS
LVDETGEKIKDELLDSGEVSLSGQQILEKALTADGYRYVVAWNKLYRSTLFEKLKFKKGM
LYEDEFLNYPLFWDCKRVSIVEEPLYLYVQRKGSIIQSNMTLEKIKMKDKMHTSRIEFYA
EKKNSFLHQRSCQQYCNWIVTITVSHYNVLNVAFLKYLQHQFRRIVKYTQNDDKKLIIQN
ILGYINIRLAAYVKSKVM
>orf00419
(SEQ ID NO: 670)
MFPIYIISNQNIAFQQEIDIAYRKMKRQFSHISLTESEQKNDMNISNKVWICWFQGEERP
PELIRTCIQSMRTHFLGREIIVLTEENISDYIDIPDYITDKYKKGSISRAHYSDILRVEL
LCRYGGLWVDVTVLNTGGDFSNLELPLFVYKSLDLSRKDSQAIVASSWLISSYSNHPILL
YARKLLWEYWRRKNSLCNYFLFHIFFTIATELYPIEWSAVLTFNNHSPHMFNFELNNQFS
EKRWEQLKQISVFHKLNHHIDYSIGVNNFYKFIVFSKVEKNE
>orf00420
(SEQ ID NO: 671)
MSNKISKNLAYNIGYQLIGIAFPLITSPYLSRILGAENLGIHSFTISVALYFMMFMLLGI
ANYGNRTIATVKREGKEILSKTFWNIYYVQLLMSVLVTIAYLIYLYFWVSSYKFIAILQL
FLLLSNAVDITWLFYGLEDFKQIVFRNTLVKLLGLFLIFSFVHESSDLWKYTLINGGVTL
VGQLLLWGQLKGRLSWVKIQKKDLLSHIKPILVLFIPVLAISIFSNMDKYMLGLMVGVKQ
VGFYDNANRIIDIPKALIAALEAVMLPRTSYLLAEGQEEKSNYYIEVTILYAMMISSVLI
FGIISVSDIFSLVFWGEEFLESGRLIAAMAPVFVFSVPGNIIRTQYLIPRAKDKDYVLSL
IIGALVNILLNCFLIKPFGAMGATISTVLAEFVLYGVQFWTVRRDLDFKKYLKNGFIFYL
FGMIMYLAIIAVKAHLQYNIINLVLLIVLGGIVYTGFCCFYILISRNVHFEILREKIKRK
IGYENIL
>orf00422
(SEQ ID NO: 672)
MFVADIMISDYSSAPIDFLLLNRVVFLYLPDFKEYQSDKNPFFEVFKVSKTKGIALDPFD
EIIGRFQFGVRIV
>orf00428
(SEQ ID NO: 674)
MGFSMKLIHDLNTHTTHSTAKMLYNVKAIKNDFSIRE
>orf00431
(SEQ ID NO: 675)
MEQLHFITKLLDIKDTNTQIIDVVNRDSHKEIIAKLDYDAPSCPECGSQMKKYDFQKPSK
IPYLETTGMPTRILLRKRRFKCYHCSKMMVAETPLVKKNHQIPRIINQKIAQKLIEKISM
TDIAHQLSISTSTVIRKLNDFHFECNFRNLPKIMSWDVETVRGVTVSIGRWR
>orf00444
(SEQ ID NO: 677)
LQIAQESSQDTDGINPPVVEEAMVFDRNDCLNQICGNIISLGIDAAFRTQVSNELIFIVV
DFTRSCCN
>orf00446
(SEQ ID NO: 678)
MLNLMWMKIFHRNRTFLFCFLDFKVDVISIINARIVRR
>orf00447
(SEQ ID NO: 679)
MYNSQALRQIVVVGSIDHLFKRHSSICEIFGLRKRCLSFL
>orf00472
(SEQ ID NO: 680)
MSLADLLEELEAAKDSKKARSMEAYMRHQFSFLGIAVPERNKLYKNIFQKRKKQRLSIGI
LQTLAGKRSLENTNMWLLTI
>orf00473
(SEQ ID NO: 681)
MEKILLHNLNQTEFFINKAIGWTLRDYSKTNPTWVTCFIEKNKERMAELSIKEASKYL
>orf00477
(SEQ ID NO: 682)
LSTCWNGKFCHICVALFHCFRAFKLALNEILCLLTNVSFIFVSVAF
>orf00487
(SEQ ID NO: 683)
LLGSFFSWTTKELMGIIFFNNFPTVHKNNMMGYISSKTYLIKLIKNSI
>orf00509
(SEQ ID NO: 684)
LKNVFSVGCHFFQFFVRFFWFGKFDHFNLVELVQTDQATRITTGRTSLRTE
>orf00535
(SEQ ID NO: 685)
LIDIKHFFLCLPLSKKMIIDIIVNKNPDRFCMIEKVKKTMAENR
>orf00539
(SEQ ID NO: 686)
VNIDSSEFYISHITDGIFDSFLDSNRYLRNFYSVLKVEIDICCEFFVHVFKINATAE
>orf00540
(SEQ ID NO: 687)
VNTLYLCSSDSNDFFKYTWGDNDFAKLFFNSHRMTSF
>orf00550
(SEQ ID NO: 688)
VKEEKKAIVLGADNAYMDKVETTIKSLCVHHYNLKFYVFNDDLPREWFQLMEKRLETLNS
EIVNV
>orf00551
(SEQ ID NO: 689)
VSNEIKIIALKLSIFWGHNHFRLTGNWKIFYLCLKSGLA
>orf00552
(SEQ ID NO: 690)
MKRIQLNMNETKKYLVIKAIAQGKKTKKRACVELNLSERQINRLLLAYQQKGKEAFRHGH
GNRNRKPKHAIPDEIKERVLKKYLSYETYKPNVLHFCELLAEEEGIKLSDTTVRKILYKK
NILSPKSHRKTKKRVRKQAKLNLNQPLDNPILPTAKDFLEDPKKVHPSRPRKKFAGELIQ
MDASPHAWFGPETTNLHLAIDDASGNILGAYFDKQETLNAYYHVLEQILANHGIPLQMKT
DKRTVFTYQASNSKKMEDDTYTQFGYACHQLGILLETTSIPQAKGRVERLNQTLQSRLPI
ELERNNIHTLEDANTFLLSYIQTFNEQFGNKTKLSVFEEAPNPSERNLILARLAERVVDS
GHHIRFQNRYYMPVEQGKEVYFIRKTKALVLKAFDGDIYLNIADKIYHTKELLDHELYSK
NFEQEPEQKKKDASISLHKPIRGNSHLSNNTFIKIKRIMKSLLVRSFILLNYKYNLFFAK
WEAFP
>orf00556
(SEQ ID NO: 691)
LVEQLTFNQWVTGSSPVRVIYAGLAELADAPDLGSGA
>orf00557
(SEQ ID NO: 692)
MGEEEMRNKMIIAVSLVVAGVMTYLMFSGLDEDFYHFP
>orf00567
(SEQ ID NO: 693)
MNTIERTRRLVKGCATHCFEVVDRTDEVSSKHVFEVVDETNEVSSKHVFEVVDETDEVSN
HTYGKAT
>orf00581
(SEQ ID NO: 694)
MLSNDFIQLRKDDIKTTSVLYFPIRLFSLETMNMSSQYF
>orf00582
(SEQ ID NO: 695)
LTCYPNPQKRLEAGFDKLIEIKRLTASKIQDILSVAPRSIGTTSPAREFEIIENIKHYKR
LIDKAKKCVNDLMAEFNSVITTVTGIENRLGAVILAEIRNIHAFDNPAQLQAFAGLDSSI
YQSGQIDLAGRMVKRGSPHLR
>orf00595
(SEQ ID NO: 696)
MKRIQLNMNETKKYLVIKAIAQGKKTKKRACVELNLSERQINRLLLAYQQKGKEAFRHGN
RNRKPKHAIPDEIKERILKKYLSYETYKPNVLHFCELLAEEEGIKLSDTTVRKILYKKNI
LSPKSHRKTKKRVRKQAKLNLNQPLDNPILPTAKDFLEDPKKVHPSRPRKKFSGELIQMD
ASPHAWFGPETTNLHLAIDDASGNILGAYFDKQETLNAYYHVLEQILANHGIPLQMKTDK
RTVFTYQASNSKKMEDDTYTQFGYACHQLGILLETTSIPQAKGRVERLNQTLQSRLPIEL
ERNNIHTLEDANTFLLSYIQTFNEQFGNKTKLSVFEEAPNPSERNLILARLAERVVDSGH
HIRFQNRYYMPVEQGKEVYFIRKTKALVLKAFDGDIYLNIADKIYHTKELLDHELYSKNF
EQEPEQKKERRKYIPPQTHPWKLTSFKQYLHKNKKDYEEFTSEEIHSPQLQV
>orf00601
(SEQ ID NO: 697)
MDTKSSCLITTGRNDSPSTCLPRVASNNDRFSSEFRIIPDFHCSKKGIHVNMDDFS
>orf00604
(SEQ ID NO: 698)
MMSIREQDLKDIGAIIKYKNFHSPFDTFKYLKDMGFDTIDLSVLLEGFSYAYGMDWLEKF
FKENQDKLREFY
>orf00610
(SEQ ID NO: 699)
MIPLYRTDNDITKFFTKIRNGHLAKTAGGLDDKFHEANASTSKAFDRQGVGEVNDIRDSA
GSQELRINDKRKTENILFLEIRVRIFRVPHPNDSFFSSHFLG
>orf00611
(SEQ ID NO: 700)
VLSQGDKDITILDAGLLKNGKIGPVTKDTNDIKATDNMIENSFVLLNQQNIMLFCNQGAT
EGKTNFSPSDKDNFHNKTYFFMM
>orf00616
(SEQ ID NO: 701)
MKIKEQTRKLAAGCSKQCFEIVDRTDEVSSKHGFEVVDETDEVSNHTYGKAKLTWFEEIF
EEYKMMGKAGQLVFFDVYRLVRQVS
>orf00645
(SEQ ID NO: 702)
LVEIVRGGSPRPIKDYLTSEVDGINWIKIGDTEKGEKYINNVKEKIKKSGLNKTRFVKKG
TFLLTNSMSFGRPYILNVDGAIHDGWLAISNYENSLNKDYLFYILSSNVVYSQFLSLISG
AVVKNLNSDKVASILIPLPPLAEQQRIIEAIESALEKVDEYAESYNRLEQLDKEFPDKLK
KSILQYAMQGKLVEQDPNDESVEVLLEKIRAEKQKLFEEGKIKKKDLDISIVSQGDDNSY
YEEVPCEIPESWEWVRLNDITSYIQRGKSPKYSNIPIYPVIAQKCNQWSGFSIDLARFID
PETVHSYQKERLLRDGDLMWNSTGLGTLGRLAIYHENKNPYVWAVADSHVTVIRVLSGVI
NCHFIYNFLSSPIVQSVIEEKASGSTKQKELLTKTIKEYLIPLPPLPEQSRIVDKIEQFF
AHIDALI
>orf00657
(SEQ ID NO: 703)
MTPEQLKASILQRAMEGKLVPQNPNDEPASELLKRIKAEKEKLISEGKIKRDKKETEIFR
GDDGKHYGKFADGSTQEIDVPYDIPDTWEWVRFSTLVEIVRGGSPRPIKDYLTSEVDGIN
WIKIGDTEKGEKYINNVKEKIKKSGLNKTRFVKKGTFLLTNSMSFGRPYILNVDGAIHDG
WLAISNYENSLNKDYLFYILSSNVVYSQFLSLISGAVVKNLNSDKVASILIPLPPLAEQQ
RIIEAIESALEKVDEYAESYNRLEQLDKEFPDKLKKSILQYAMQGKLVEQDPNDESVEVL
LEKIRAEKQKLFEEGKIKKKDLDISIVSQGDDNSYYGNIPMNWVVIKIKDIFSINTGLSY
KKGDLSINKGVRIIRGGNIKPLEFSLLDNDYYIDTQFISSEQVYLKHNQLITPVSTSIEH
IGKFARIDKDYDGVVAGGFIFQLTPFESSEIISKFLLFNLSSPLFYKQLKAITKLSGQAL
YNIPKTTLSELLIPLAPFEEQELITQKVEKLFEKVNQLWK
>orf00669
(SEQ ID NO: 704)
MCKANSRNDIFILQDSFCFEIFSRKKFKIVKEVLPNSTCKFRVVQ
>orf00673
(SEQ ID NO: 705)
VDRTDEVSSKHCFEVVDRTDEVSNHTHDKPTLTWFEEIFEEYHSPFHN
>orf00674
(SEQ ID NO: 706)
LDNIHIVLDSLNAVSGIQDFICDGLAIFCNQITSGCSSCK
>orf00683
(SEQ ID NO: 707)
MGPLLMHLCQQLVWLAKYLKRAGSDMMFLQEFLNRRFNPSLLGKIIL
>orf00684
(SEQ ID NO: 708)
LVAKGQGHKLRVSRHKDNQGIGVLFPNLSSHFQPLHLLISNLNIQKE
>orf00692
(SEQ ID NO: 709)
MTSYHRTFVPQIDARDCGVAALASIAKFYGSDFSLAHLRELAKTNHEGTTALGIVKAADE
MGFETRPVQADKTLFDMSDVPYPFIVHVNKEGKLQHYYVVYQTKKDYLIIGDPDPSVKIT
KMSKERFFSEWTGVAIFLAPKPSYQPHKDKKNGLLSFLPLIFKQKSLIAYIVLSSLLVTI
INIGGSYYLQGILDEYIPNQMKSTLGIISVGLVITYILQQVMSFSRDYLLTVLSQRLSID
VILSYIRHIFELPMSFFATRRTGEIISRFTDANSIIDALASTILSLFLDVSILILVGGVL
LAQNPNLFLLSLLSIPIYMFIIFSFMKPFEKMNHDVMQSNSMVSSAIIEDINGIETIKSL
TSEENRYQNIDSEFVDYLEKSFKLSKYSILQTSLKQGTKLVLNILILWFGAQLVMSSKIS
IGQLITFNTLFSYFTTPMENIINLQTKLQSAKVANNRLNEVYLVESEFQAPENPVHSHFL
MGDIEFDDLSYKYGFGRDTLTDINLTIKQGDKVSLVGVSGSGKTTLAKMIVNFFEPYKGH
ISINHQDIKNIDKKVLRRHINYLPQQAYIFNGSILENLTLGGNHMISQEDILKACELAEI
RQDIERMPMGYQTQLSDGAGLSGGQKQRIALARALLTKAPVLILDEATSGLDVLTEKKVI
DNLISLTDKTILFVAHRLSIAERTNRVIVLDQGKIIEVGSHQELMQAQGFYHHLFNK
>orf00699
(SEQ ID NO: 710)
LRIYLHEPLITTVSQDFSSLSDISATHFEQLHIVAIVHSDIQRNNSPLTCDNRLSLHSVK
FLFTRIIG
>orf00723
(SEQ ID NO: 711)
MGLIKTLAKIYGNYFLTVQGVKVMKTIKKDDNAVVGLGKLFIADKLMDTARWLIKPEDKK
>orf00724
(SEQ ID NO: 712)
MKFFWGLLAILFIKPIIGIVKFFWMIISFAVQLLFYKILDWFFKLI
>orf00725
(SEQ ID NO: 713)
MKIKEQTRKLAADCSKQCFEVVDRTDEVSSKHRFEVVDRTDEVSNHTYSKVKLTWFEEIF
EEYKMILLLILYHMERD
>orf00733
(SEQ ID NO: 714)
MHSQTFQFLLMTDKTSLLHRKHRSFIRNIHSKFLILFDLLCGILSRNDSNHNPIS
>orf00736
(SEQ ID NO: 715)
MARTELPDKIETERLVLRVRTVADAEDIFDYASLPEVAYPAGFPPVKTLEDEIYYLEYIF
PERNQKENLPAGYGIVVKGTDKIVGSVDFNHRHEDDVLEIGYTLHPDYWGRGYVPEAARA
LIDLAFKDLGLHKIELTCFGYNLQSKRVAEKLDFTLEARIRDRKDAQGNCCDDLRYALLK
SEWEVI
>orf00741
(SEQ ID NO: 716)
MGKIVAIDLFNGAGGTTSGLKKSGIDVQVAVEIDSVAVKTYKLNNPEVSVIDME
>orf00746
(SEQ ID NO: 717)
LLRKQEGEYLRAENAILKKLRELRLKEEKEKEERQKLFKN
>orf00768
(SEQ ID NO: 718)
LKHLFCHFNPLWIDEIIRLAYKDQDTKDVKSKVKIGN
>orf00792
(SEQ ID NO: 719)
LCCNRHIANLDLEFISYYLGQVGFDTRISTGLGIFVTKIGNVLFDTDNQFASFLNVCDTS
ISLDWFGSSKAEKANQ
>orf00817
(SEQ ID NO: 720)
MKTKEQTRKLASGCSKHCFEVVDGTDVVSSKHCFEVVDRTDEVSNHTHGKATLTWFEEIF
EEY
>orf00819
(SEQ ID NO: 721)
MDFFFMNEVKEQVLFRDNHSEHIFWIEGVSDFMIKVNTALW
>orf00839
(SEQ ID NO: 722)
MEELVTLDCLFIDGTKIEANANKYSFVWKKTTEKFSAKLQEQIQVYFQEEITPLLIKYAM
FDKKQKRGYKQSAKNLANWHYNDKEDSYIHPDGWCYRFHHIKYQKTQTDFQQEIKVYYAD
EPESAPQKGLYMNERYQNLKAKECQALLSPQDRQIFAQRKIDVEPVFGQIKACLGYKRCN
LRGKRQVRIDMGLVLMANNLLKHSEMK
>orf00840
(SEQ ID NO: 723)
MHIHYNTNQTTLPLEISSFLPQDHLVFTIEKVVNTLEERHFYAFYHAFGRPSYHPKMLVS
TLLFAYSQGIFSGRKIEKWKS
>orf00843
(SEQ ID NO: 724)
LRLWVIFVIMKVIKSYNTLNDYYRKLFGEKTFKVPIDAGFDCPNRDGTVAHGGCTFCTVS
GSGDTIVAPDPPIREQFYKEIDFMHRKWPDVQKYLVYFQNFTNTHEKVEVIRERYEQAIN
EPGVVGINIGTRPDCLPDETIEYLAELSECMHVTFELGLQTTYEATSDLINRAHSYEL
>orf00845
(SEQ ID NO: 725)
VETVKRLRKYPKIEIVSHLINGLPGETHEMMVENVRRCVTDNDIQGIKLHLLHLMTNTRM
QRDYHEGRLQLMSQDEYVRVICDQLEIIPKHIVIHRITGDAPRDMLLGPMWSLKKWEVLN
SIEMEMRRRGSVQG
>orf00853
(SEQ ID NO: 726)
MKIKEQTRKLAAGCSKHCFEVVDKTDEVSHIHTVRRR
>orf00859
(SEQ ID NO: 727)
VQVCVFTNFCFFHCFSSLANCRLFNLRGICLPCISYQ
>orf00868
(SEQ ID NO: 728)
VFKKDRFSIRKIKGVVGSVFLGSLLMAPSVVDAATYHYVNKEIISQEAKDLIQTGKPDRN
EVVYGLVYQKDQLPQTGTEASVLTAFGLLTVGSLLLIYKRKKIASVFLVGAMGLVVLPSA
EAVDPVATLALASREGVVEMDGYRYVGYLSGDILKTLGLDTVLEETSAKPGEVTVVEVET
PQSTTNQEQARTENQVVETEEAPKEEAPKTEESPKEEPKSEVKPTDDTLPKVEEGKEDSA
EPAPVEEVGGEVESKSEEKVAVKPESQPSDKPAEESKVEQAGEPVAPREDEKAPVEPEKQ
PEAPEEEKAVEETPKQEDTQPEVVETKDEAANQPVEEPKVETPAVEKQTEPTEEPKVEQV
GEPVEPREDEKAPVSPEKQPEAPEEEKTAEETPKQEDKIKGIGTKEPVDKSELNNQIDKA
SSVSPTDYSTASYNALGPVLETAKGVYASEPVKQPEVNSETKAEKVAANTDAKQSEVNSE
TASLKTAISGLNTDKVELENQLKIAQGKTETDFSMESWTVLSTAKNKAQEVKDNGTATQE
QINEAEKSLKTALADLSVDKTALGSAIDTATKKNKENYTNQTWAELETVLTAAKSVNTNE
SKQSEVNEAVEKLTATIEKLVELSEKPRLTLSIEKRDIDRKVTVTYTLENPANTQIKSIT
ATLKKGEEVVKDFVLTEENLKTNHLTALFEKLDYYKEYTLSTDMVYNRGNDDETESISEE
LIQLNLKKLELKDIQTVSLMKFENGQESQVTHLSDKPTDLSKLYLKVTSSTSKDAVLAVS
SIEEEIVENKKIFKIHADTPELVVRKKDGSLSKGFDYYMERVIPHDGDIYYDFKDLISAM
TSNPTGTFILGRDISSRNVKPDGNGKSYIKGEFKGKLLGTNDNVRHSIFDLEYPLFDTIK
SGVVKDIDFKHVNMVFPDSNQGDNVATIARVIKDKTKIENVNVEGYLEGRDHVAGLVNNL
EGNSEIENISFTGKIKSKGGNSITAGIAGRNILSRVKRAYVNANIEVLGSTNSSMLVAVN
GTTLNASGGWGAWGRLTESVAKGTLEIKRSGQAGGVTATVWPYGAIDKVVSYAKVTKGKE
LFGSDGDLNNNWFMQKINNIFGVQGISSGDSGNDSKFKRISEEEAKQKVASYNITAPNLM
SDSSLLVDRLNESWKNTDQFESIQDYQSQNQLIYQNLTKFTPYYNKEFIVHEGNALTPEQ
EILKTKKIKSIVGLKGTEFVVDGSDIDTIMLHFEDGSQKRYKVTSTGKFSITNLPEYQVE
DLNVVYTSEHIVHPLDSSLINNLVEELKKVELYTESTYQVLGIDKDNANKLNRTKRLFLD
ESLDAVKTQLPTFVKTMFENEWLHINGESSGAVAALRQKIMDNKTAILLALTYINRYYDV
KFSDYNIKKLMLFKPTFHGEKIDLLDRLIRLGSSGENRLKGSENAETFKQLFASETKQKD
LVTYLDYNRSLLTNYQTTGEWFKETTKDYIQFEERPSLVEEIKDAKYRVYDNLTAPYYQG
YILPLLTLKNTHLAILSNYSTMTFVSREKRPNWKNEDFDKWVKYVATAHRNHVDTWYKIL
PDNIKGKMVKENVTAVWEGLSIPGSEWVDQNAVDRKGRDYAPAREFFNLVGGPMGGWYAY
HGYGAHAGGRNRVNYEVFDVLSEYGISVFTHELTHVNDTWIYLGGYGRRENMGPEAYAQG
LFQSPVPGQPGWGALGLNMAFERKNDGDLIYNASPTQFENRKELDSYMKNYNDTLMMVDY
LEGDAVISKGKEAITKWFKKVEPKVVSQTAQYDTVRQLTAEEKEKLSVSSVDDLVDQGLM
SDRAVGNNTYNPADFETSYIAIDYMTGIYGGGKNSVGSPGALMFKHNTFRMWGYYGFEEG
VLGYASNKFRQASRDEGHAGLSDNFIISKISKGEFLTMEAFKKGYFKKVVEELKTKGIRP
VTINQKTYSTFEELQEGFKQAVERDLKKNQLDERETRNFKFQVFRQLLQQTDSFKTSIFR
>orf00883
(SEQ ID NO: 729)
VGNRIFIAFLQKLGLLDNLTGIREKLHPITGQGNTLGIADKDFNAHFIFQISHCIGETGL
SDKELLGCLIHRASFDDFDNIM
>orf00892
(SEQ ID NO: 730)
MKTKKHRLLALALISSFTLLGAASAAVQYPDGGVWTYGEGSGGGWAFSNYYHGKKYHYSS
LVSRWNSHSDKGEASAGKTSYAWIWTKWGEQVAFYCDYD
>orf00903
(SEQ ID NO: 731)
MSMIEVSHLSKSFGDKIALNDISFTVKEGQIFGFLGPSGSGKTTTINILTGQLLADKGQS
IILGQKSQNLTSGELKRIGLVSDTSGFYEKMSLYNNLLFYSKFYNISKLRVDNLLKRVGL
YDSCKMVAGKLSTGMRQRMLLARALINKPAVLFLDEPTSGLDPTTSRTIHELILELKTAG
TTIFLTTHDMNEATLLCDYVALLNKGKLVEQGAPSELIQRYNKDKKIKVTDYNGNQITFD
FTSLEQVSQADLENIFSIHSCEPTLEDIFITLTGGKLNA
>orf00911
(SEQ ID NO: 732)
LISNKVDITLANFTVTDERKKQVDFALPYMKVSLGVVSPKTGLITDVKQLEGKTLIVTKG
TTAETYFEKNHPEIKLQKYDQYSDSYQALLDGRGDAFSTDNTEVLAWALENKGFEVGITS
LGDPDTIAAAVQKGNQELLDFINKDIEKLGKENFFHKAYEKTLHPTYGDAAKADDLVVEG
GH
>orf00912
(SEQ ID NO: 733)
MKLFKPLLTVLALAFALIFITACSSGGNAGSSSGKTTAKARTIDEIKKSGELRIAVFGDK
KPFGYVDNDGSYQGYATILN
>orf00946
(SEQ ID NO: 734)
MTGKKGFLFLNCHICMVTTTTCFLKERVESELLIFFTFC
>orf00948
(SEQ ID NO: 735)
MDTPDENGYVADDYRITYLEAHIKAMRDAIYQDGVDLLGYTTWSCIDPVSAGTGEMNKRY
GFIYVDRDNVGNGTLKRSKKKSFYWYMSFIAMV
>orf00953
(SEQ ID NO: 736)
LSCQIAFCLIDRLDYPIMFSKVCQENHFQVFTPFSKKLKNFLKNA
>orf00966
(SEQ ID NO: 737)
MFLGMIGNISIILQFFGITIIVKIDNQARAIDFFKHDKSSF
>orf00968
(SEQ ID NO: 738)
MFSLNFFDDNVFLSIKIAHKGCFQLLDMTNPNFFNKFFLAQASDQLLHFLSWNIEL
>orf00978
(SEQ ID NO: 739)
MTEPDFWNDNIAAQKMSQELNELKNTYNTFHKMEELQDEVEILLDFLAEDESVHDELVAQ
LAELDKIMTSYEMTLLLSEPYDHNNAILEIHPGSGGTEAQDWGDMLLRMYTRYGNAKGFK
VEVLDYQAGDEAGIKSVTLSFEGPNAYGLLKSEMGVHRLVRISPFDSAKRRHTSFTSVEV
MPELDDTIEVEIREDDIKMDTFRSGGAGGQNVNKVSTGVRLTYIPTGIVVQSTVDRTQYG
NRDRAMKMLQAKLYQMEQEKKAAEVDSLKGEKKEITWGSQIRSYVFTPYTMVKDHRTSFE
VAQVDKVMDGDLDGFIDAYLKWRIS
>orf01011
(SEQ ID NO: 740)
MQVIKRNGEIAEFNPDKIYQAILKAAQTVYVLTDDLRQNLAQVTKKVVLDLQEAKVERAT
ISMIQSMVEHRLLGAGYITIAEHYISYRLQRDLERSGYGDHIAVHLHFEQIR
>orf01015
(SEQ ID NO: 741)
MKIKEQTRKLAAGCSKHCFEVVDETDEVSSKHCFEVVDETDEVSNHTYGKAKLMRFEEIF
EEY
>orf01068
(SEQ ID NO: 742)
MKVINQTLLEKVIIERSRSSHKGDYGRLLLLGGTYPYGGAIIMAALAAVKSGAGLVTVGT
DRENIPALHSHLPEPMAFSLQDQQLLKEQLEKAEVVLLGPGLRDDASGENLVKQVFVNLS
QNQILIVDGGALTILARTSLSFPSSQLILAPHQKEWEKLSGITIEKQKEDATASVLTSFP
QGTILVEKGPATRIWEVGQSDYYQLQVGGPYQATGGMGDTLAGMIAGFVGQFRQASLYER
VAVATHLHSAIAQELSQENYVVLPTEISRYLPKIMKIICQQERGSKDKLV
>orf01077
(SEQ ID NO: 743)
VLDSKEELKESENDAPKLETPLREEPRLAPQTLPEASEVLENKREESKVEIIEPAQADDI
RKVVGELAKDISITKLYMTGHSLGCYLAQIAAVEAYQKYPDFYNHVLRKVTTFSAPKVIT
SRTVWDAKNGF
>orf01091
(SEQ ID NO: 744)
LSYSILICLCNSTINESLRAFYCWQKFITFNQVTGNARGKGTTCTSIGPDN
>orf01094
(SEQ ID NO: 745)
MGRKPRTRPEERTELERLQAENEYLRAENAILKKLRELRLKEEKEKEERQKLFKN
>orf01096
(SEQ ID NO: 746)
LSTCWNGKFCHICVALFHCFRAFKLALNEILCLLTNVSFIFVSVAF
>orf01109
(SEQ ID NO: 747)
VVLSTSAILVACGKTDKEADAPTTFSYVYAVDPASLGYSIATRTSRTDVIGNVIDGLMEN
DKYGNVAPSQKDYDLNSTGWAPSYQDPASYLNIMDPKSGSAMKHLGITKGKDKDVVAKPG
LDKYKKLLEDAVSEITDLEKRYEKYAKAQAWSTDSSLLMPTASSGGFPVVSNVVPFSKPY
SQVGIKGEPYIFKGMKLQKDIVTTKEYNEVFKKWQKEKLESNSKYQKELEKYIK
>orf01113
(SEQ ID NO: 748)
LNFDFFIFLAHFIPLFTFSILQENPKTSKKKLYIRLL
>orf01119
(SEQ ID NO: 749)
MGFSMKLIHDLNTHTTHSTAKMLYNVKAIKNDFSIRE
>orf01134
(SEQ ID NO: 750)
LIRIIRNIYRSGEGNTSVFQSFIDQINSNQFCYGSNFDRLRCILLIENFTSICLNSNRMF
SGNGKILSNSSRSTP
>orf01137
(SEQ ID NO: 751)
MNATDIKNTYLKYIKENAVFNDVTDTHTEVITPFIDPLGEAIGFSIKSNGKHLTVTDDGY
TIWNLSINNIDVTKKGRRQDIFNSLLHFNGFDLHDGAIERTTGKEHLGQVIHDMTQLLMN
VYDFIQLTPNNIKSQFLDDVKSYFMKNEHYTVFPAFSIAGKSRLEHRFNFVFMSKGISKI
ARVHNNITKQQVDTILASWLDTSEYRRKEYGDTEQLYIIVSDEGYNNIKDDHQIALQEYG
INILNFSDKEQLEIQLGK
>orf01138
(SEQ ID NO: 752)
MSKVVKVTGAEVVISHNEEYLKVNPSELNFVPKLGDEVEVHKVDGEIIVIKVKDKKDDKI
NINIVNENNAMQNQSQVVHTQEIATGVHYVNKWVYVILALFLGGLGIHHFYAGYNGKGFL
FLILSLTGIPAIIALFQGIIALFKKPDVYGRIAV
>orf01149
(SEQ ID NO: 753)
MKIKEQTRKLAAGCSKHCFEVVDRTDEVSSKHGFEVVDETDEVSSKHGFEVVDETDEVSN
RTTVRRR
>orf01156
(SEQ ID NO: 754)
LQNDKNHKLFDNYTCQKEKDVLQCKQVKRKEERSYDVGTRIYTIYYFLLF
>orf01158
(SEQ ID NO: 755)
VDRTDEVSSKHGFEVVDETDEVSNHTYGKVKLTWFEEIFEEY
>orf01159
(SEQ ID NO: 756)
LFFKDEKQALYTKPKTKSSSFRASKVSNQTIVATTRTDCQVIALNLCDKLENGVVVVVQT
THHIGIDDVIYSKIFQHLTHSIEMSLAFFIKKVQDRRRILYCHLVFFFLRVQDTKRIFLQ
ATLAILRQGLLERCQIVNQGLAVGCTALRISKSVEVQFDTLNTDFLQKMGCHSDCFHIGS
WIARAKTLNTNLVELAQAPCLWTLITEHRSHIVELAWLLHFWGEEFIFHIGTDNGRSSFW
TEGNMTVTLVIKIVHFLGYDIRCISDRATDNLVMLKNRRAHFCIVIALENLTGKALNVLP
LSRFSR
>orf01164
(SEQ ID NO: 757)
MEQIGKVFRQLRESRNISLRQATGGQFSPSMLSRFETGQSELSVEKFLFALENISASVEE
ILFLARGFQYDTDSELRKEITDVLEPKNIAPLEDLYRREYQKHAHSHNKQKHILNAIMIK
SYMKSIDERVELTAEEGKVLHDYLFSTEIWGIYELNLFSVSSPFLSVSLFTRYVREMVRK
SDFLMEMSGNRNLFHTILLNGFLASIECEEFTNAYYFKRVIEEHFYKENETYFRIVYLWA
EGLLDSKQGRVKEGQKKMEDAVCIFEMLGCNKSAEYYRNTTEC
>orf01165
(SEQ ID NO: 758)
LIPYFLHFIIFFRKFIKNLPNCQNYEKIEDIYHVEGLL
>orf01167
(SEQ ID NO: 759)
MKIKGQTRKLAAGCSKHCFEVMDRTDEVSSKYCFEVVDRTDEVSNHTYGKATLT
>orf01170
(SEQ ID NO: 760)
VVPFSDTFKDRNQVDIFTIKISRCNSSTIGENSWDIHISNSNHRSRHVLVTATDSDEGIH
VVTTHSRLDGVRDDVTRC
>orf01190
(SEQ ID NO: 761)
MKKVKLGEVLSLKKGKKATVLAEQTTLSQRYIQIDDLRNNNNLKFTESLNMTEALPDDIL
IAWDGANAGTVGYGLSGAVGSTITVLKKNERYKEKIISDYLGVFLESKSQYLRDHSTGAT
IPHLNKNILLDLQLELLGIEEQENIICILNTIKRLITKRKFQLDELNLLVKSRFNEMFEE
YPDSVFLDTYIKELRAGKSLAGEENNKNKVLKTGAVSYDYFNSSEVKNLPIDYIPLDEHK
VEIGDVIISRMNTSELVGAAGYVWAINSDNIYLPDRLWKVILNDRVNPVFLWKLITNEKT
KLKIKRISSGTSGSMKNISKSQLLQIRVPFPPLALQNEFADFVALVDKSQLAIQKSLEEL
ETLKKSLMQEYFG
>orf01199
(SEQ ID NO: 762)
MKIKEQTRKLAAGCSKHCFEVVDKTDEVSSKHGFEVVDETDEVSNHTYGKATLTRIEEIF
EEYKSS
>orf01226
(SEQ ID NO: 763)
MRLSIQLIHDLNTHTTHSTAKMLYNVKAIKNDFSIRE
>orf01237
(SEQ ID NO: 764)
LVYAPFSFNILLDYITFDFKILLFSVFLAINRFHNDFIQFLL
>orf01240
(SEQ ID NO: 765)
LGTKIGISKNTIGNYEKRVKSTKKNTIFDLAKVFSSLIDALFPPVQKDSPSDIQSIYDQR
APPRQGKVLTYA
>orf01246
(SEQ ID NO: 766)
LFVFILIFLKSSIYIGIFWFIDFGKAVDFQGWKVLFEFFMVVIDQFSFGCNPGVVFILPG
IALGQQSIDTRICDTVDNAESEQKLTIGMTGVVIDKACKLDCLALKFIWIVVDSLHDFHI
VFISDLNTILG
>orf01247
(SEQ ID NO: 777)
MTVGFDLLHPDIQLNNCQDKGKHHGDIGQIGIVHVDVLV
>orf01249
(SEQ ID NO: 778)
MEGVAKGRIGRKKNNGIDNRCCHKKRNGRVTWNLFFQKTIDDGDDSTFTRREKYTDKGPK
KDSPPTISREKMINLVRCDINFNQP
>orf01262
(SEQ ID NO: 779)
VVIGVASATTNIWIIFLSGFTAILAGAFSMAGGEYVSVSTPKDTEEAAVSREKLLLDQDR
ELAKKSLYAAYIQNGEFKTSAQLLTNKIFLKNPLKALVEEKYGIEYEEFTNPWHAAISSF
VAFFLRSLPPMLSVTIFPSDYRIPATVLIVGVALLLTGYTSARLGKAPTKTAMIRNLAIG
LLTMGVTFLLGQLFSI
>orf01277
(SEQ ID NO: 780)
MILMTKNINLTNEELELIQGGADPYGKEPNGYYPWKMEPVLTLLVHGFCPRDTDDLGYIG
GGNHLCKGSAARF
>orf01282
(SEQ ID NO: 781)
LQVGQANEIGDPGAHFTQWNLLDDIGFDQLIQPNQKQYNDCHYCSFFHDFLF
>orf01301
(SEQ ID NO: 782)
LLHICIGETFDCIPYCMLTFFLSKSIGLTILLHKVKTVVFIDDQSNDKTCKICIHISFFR
IKLSQQCQLSFSVYF
>orf01309
(SEQ ID NO: 783)
MTTIFLTRTSCSNCGKQSTFERFDRVYAAKTPEIISAILDWDFFKFTCHNCNHKVLIDYP
TVVVDEEQKTIIQYCADGNVDVLSMQICSLISEGVNLSEYRIRVVSDIESFVEKVQIVSV
GYDDRAIELMKYMNSPLEDGDIQFNYEHMVETKVGHENYQFMFINNQIAVASLDFSQEQY
EYYLADVEDLETNTYYIDSRWAESFFRTSLA
>orf01310
(SEQ ID NO: 784)
MVRRNSKITRQQKKIRDAFVSERTVEIIPAKREFTDVKTKKLRVAAYCRVSTFDESQSGS
FELQKQTYTERINSNPDWIMAGIYADQGASGTSIKRREQFQQMLHDCRCGKIDLIIVKSV
SRFARNQLDFISIYRELKALSPPVGIYIEDINLNTLDTNSEFILGIMAIVAQGESEQKSA
SITWSVIERFKRGIPMIPTHNLLGYTKDQYGRVVIDETEAKIVRLIYDSYIEGMTASEIA
STLMTNHIPTVTGLERWTSLAVYNILRNEKYKGEIIMQKTYTVDCFSHKTRKNNGEKPKY
RLKNGIPSIIPESRWDLVQELLKQPRRKSKSTSEIFVPKLYIKKLKSGKLRDFVVLDPSW
KSEDIHEVFK
>orf01311
(SEQ ID NO: 785)
MTVNKNEVTFSKGIVQALEYPAHVLVAFNKDTKVMGIQVCRAKTRGAFSFSKPVGEQKGI
VQVGHKTLKETLLTIMSEWKSDKRYRVEGIHIPEDKAFVFELKDFDELSDERKNDNR
>orf01313
(SEQ ID NO: 786)
MEKYNNWKLKFYTIWAGQAVSLITSAILQMAIIFYLTEKTGSAMVLSMASLLGFLPYAVF
GPAIGVLVDRHDRKKIMIGADLIIAAAGSVLTIVAFYMELPVWMVMIVLFIRSIGTAFHT
PALNAVTPLLVPEEQLTKCAGYSQSLQSISYIVSPAVAALLYSVWELNAIIAIDVLGAVI
ASITVAIVRIPKLGDRVQSLDPNFIREMQEGMAVLRQNKGLFALLLVGTLYMFVYMPINA
LFPLISMDYFNGTPVHISITEISFASGMLIGGLLLGLFGNYQKRILLITASIFMMGISLT
ISGLLPQSGFFIFVVCCAIMGLSVPFYSGVQTALFQEKIKPEYLGRVFSLTGSIMSLAMP
IGLILSALFADRIGVNHWFLLSGTLIICIAIVCPMINEIRKLDLK
>orf01315
(SEQ ID NO: 787)
MELILKAKDISVEFKGHDVLDINELEVYDYDRIGLVGANGAGKSTLFKVLLGELIPPGCK
MNHLGELAYIPQLDEVTLQEEKDFALVGKLGVEQLNIQTMSGGEETRLKIAQALSAQVHG
ILADEPTSHLDREGIDFLIGQLKYFTGALLVISHDRYFLDEIVDKIWELKDGKITEYWGN
YSDYLRQKEEERKRQAAEYEQFIAERARLERAAEEKRKQARKIEQKAKGSSKKKSTEGGG
RLAHQKSIGSKEKKMHNAAKSLENRIAALGKVEAPEGIRRIRFRQSKALELHNPYPIVGA
EINKVFGDKALFENASFQIPLGAKVALTGGNGTGKTTLIQMILNHEEGISISPKAKIGYF
AQNGYKYNSNQNVMEFMQKDCDYNISEIRSVLASMGFKQNDIGKSLSVLSGGEIIKLLLA
KMLMGRYNILIMDEPSNFLDIPSLEALEILMKEYTGTIVFITHDKRLLENVADVVYEIRD
KKIKLKH
>orf01316
(SEQ ID NO: 788)
MNQLEFQRNHLQMDYYSESYQDFERDFYRYSNMNIPLTFLTDDILKTMATSRKNYFVLNK
EKSRDNRDHFFIFEVRTLEENPLIYHYTYKKTTTYLAEK
>orf01317
(SEQ ID NO: 789)
MQKWMGEFLSEHTSALTDDANKVTYMSDLSLEKKLLLLSQVYAGQLNTRIHVVKKNNQVS
YTGTIPSLTKDFILIKTTTGHINLKLKDIVSIELVEEVLYESA
>orf01318
(SEQ ID NO: 790)
MKKSINAQKKIDPANLPKTMVGHVLELFRKKYTSGAVRQIGVSYGGFVDENFTLLSLFDD
VEQIEKENRLQTAIDVVREQFGFLAIQKGTVLTEGSRNIERSKLIGGHSAGGLEGLK
>orf01343
(SEQ ID NO: 791)
MNXXFISTKDKHTLIQVSAVRFRDGREIDAYDSYVHTSVPLKSFINEFDRGLQLRP
>orf01363
(SEQ ID NO: 792)
MIAMRSYITLTCNLNNNLFCLNSFFLTNLVWSQIFSLLSVFITVYI
>orf01364
(SEQ ID NO: 793)
MVFDANRIISEDSEGFVIPHGDHNHYIKVQTKGYEAALKNKIPSLQSNYQPGTFDEKAVL
AKVDQLLADSRSIYKDRLS
>orf01390
(SEQ ID NO: 794)
MARLEPAKIAKIVLGILLYIIDLIKSSFVLPIPKAAKKSLILISFVPSFNDKNIVIRRPR
QITKIMPRFICFLFRIFACIS
>orf01396
(SEQ ID NO: 795)
MASKRLSIEEQIEKKEESIKQLQNQKRQLKKKLNEQERKARNKRLIEKGAVFESIFEESI
DLTKDEFYKLIKTLNDEEIRLNIMEILEERIDDNVEKSSKDEIT
>orf01397
(SEQ ID NO: 796)
MADSFHFSVNIISRGKGKSAVASAAYISGEKIKNEWDGVTHDYTRKEKILVKNIILPDHI
PKEFNDRSTLWNKVEMAEKNSNAQLARQFIIGLPKELSLSENKNLVERYIKENLTSQGMI
VDYAIHDESQDKNGNIHCHIMTIMRPINEKGEFLAKSKKEYILDEKGEKVLNKNGKPKTR
KVELTTWNDTGNVEKWRENFSDLCNKYLERAGAEKRVDHRVLKDKIQIIYRQSI
>orf01398
(SEQ ID NO: 797)
MERKGIETDKGNYNREIRKYNQLVKTIKEEIKTLKGWIGNLLDNLSTAYEKFKDIERDKV
IDNPKLFNLTNYLLTYSEIQKEKSKYLKGYAKTNKEKYDFKKLTSAYSYLRKNNIETIGQ
LQTKIETLKSNSYRLNKKAKTIHKEMEDVEKKILYYEIYKAKKEVYEEYQKKNIFTKEAF
YNKHKKDIDQYKVVSGKLKKLLSDKEKLSPKKWNEEKILLMSNLEEINKEKDKIKDEYQE
INHIKYSVDFVNKELGIDLSIEIDKLIKQGEKPSVIAQIKKFQDQVNKDNEYREMMKNKK
MDQER
>orf01407
(SEQ ID NO: 798)
MELSAIYHRPESEYAYLYKDKKLHIRIRTKKGDIESINLHYGDPFIFMEEFYQDTKEMVK
ITSGTLFDHWQVEVSVDFARIQYLFELRDTEGQNILYGDKGCVENSLENLHAIGNGFKLP
YLHEIDACKVPDWVSNTVWYQIFPERFANGNALLNPEGTLDWDSSVTPKSDDFFGGDLQG
IIDHMDYLQDLGITGLYLCPIFESTSNHKYNTTDYFEIDRHFGDKETFRELVDQAHHRGM
KVMLDAVFNHIGSQSLQWKNVVKNGEQSAYKDWFHIQQFPVTTEKLVNKRDLPYHVFGFE
DYMPKLNTANPEVKNYLLKVATYWIEEFNIDAWRLDVANEIDHQFWKDFRKAVLAKNPDL
YILGEVWHTSQHWLNGDEFHAVMNYPLSDSIKDYFLRGIKKTDQFIDEIN
>orf01408
(SEQ ID NO: 799)
MFNLLDSHDTERILWTANEDVQLVKSALAFFFLQKGTPCIYYGTELALTGGPDPDCRRCM
PWERVSSDNDMLNFMKRLIKIRKYASVIISHGKYSLQEIKSDLVALEWKYEGRILKVIFN
QSTEDYLLEKEAVALASNCQELENQLVISPDGFVIF
>orf01414
(SEQ ID NO: 800)
MSEQYRDIRKEVNLTADELKQIEKMMEVDNYRHFSPFVRDKILMTDDKQLAAKEWFSLWQ
SQKFEQISRDVHLVLIIARENHQVTQEHVSILLTCVQELIAEVNQVQSLSRGFREKYMR
>orf01415
(SEQ ID NO: 801)
MVYRYRTNLKKVFLTDSELHQLNERIAKSHCQNFSVYARKVLLNPNMSFVTINTDTYDQL
VFELRRIGNNINQIARAINQSRLISQEQLQELSKGVGELIKEVDKEFQVEVKRLKEFHGS
H
>orf01417
(SEQ ID NO: 802)
MVVTKHFATHGKKYRRRLIKYILNPDKTDNLKLVSDFGMSNYLDFPSYEEMVEMYNVNFT
NNDKLYEYRNDRQEKHQQNIHAHHLIQSFSPEDNLTPEEINRIGYETIMELTGGRFRFIV
ATHTDKDHIHNHILINAIDCNSDKKLIWNYALERNLRMISDRISKMAGAKIIEKRFSYRD
YQKYRATSHKFELKQRLYFLMQQSKSFDDFLEKAEQLHVHIDFSQKHSRFMMTDRAMTKP
IRGRQLSKRDLYDEDFFRMHFTKQEIASRLEFLLNCVNSLEGLLTKSKELNLTIDLKQKN
VIFILEENGKQFSLSHKKISDEKLYDVNFFQDYFKNKEVGVSEGIENLQAQYRAFQEERD
KEKVSTEEIEEAFETFKEKRDAVHEFEVKLTEHQIEKLVDEGIYIKVSFGINQSGLIFIP
NYQLDIMEEENQKKYKVYIRETTSYFVYNKEHSDKNQYIKGRTLIRQLTNDSRVIPYRRP
TVERLQEKISEISLLIELTETDKKYQDIKDNLVSEIAELDIKLTQTNEKIATLNKMAEVL
INSKSEGSGSQKLARHEFSKLNMTESTTLEQVNEELLKLQQEFGNVLDEYEKTIRKLGQL
FKVFDECINKEIMNEI
>orf01419
(SEQ ID NO: 803)
MVCLIIDVSPYSTLCDIVVPKTHFLRQLMELCDFSFIYDELEKNYQPDFGCRSYSLLIMM
FKYLLLKDIYKLSDVDVVERSFSGMTFKYFLGLAPVIEPSSLTKFRKLRNKDERLLDLLI
AKSVQIAIELGLIKSNILIVDATHTKVHYNHKKPQEVLRERSKALRKTIYQYSEYIKAEF
PSKPQEDTLVAELRYTQEVISVLEKHDELTGIPAISQNSITLKKL
>orf01420
(SEQ ID NO: 804)
LESSVKEEARIGHKSADSSFYGYKEHFAMTDERIITACVVTSGEKSDGPVLEELYHKSKD
NGVTIEAIVGDRAYSGKDNMQFTKKERVH
>orf01421
(SEQ ID NO: 805)
MSVFKFRIFGFYLVAMFGLFFKIGRFLKPLLENMFIALKGYQISLRLSPFFITAHF
>orf01425
(SEQ ID NO: 806)
MQEHYTPKGKHLTIDNRRLIERWKNENKSNREIAGLLGKAPQTIHNEVKRGTTLQQVRKG
LYKKVYSADYAQTVYQFNRKRSVKKLILTKEIREKILHYHKQKFSPEMMVNKKQVKVGIS
TIYYWFHNGHLGLTKADMLYPRKRKGVKKQASPNFKPAGKSIEERPDVINLRLENGHYEI
DTVLLTKIKNYCLLVLTDRRSRHQIIRLIPNKTAESVNQALTLLLGEHRILSITADNGSE
FKRLSEVFPEEHIYYAHAYSSWERGSNENHNRLIRRWLPKGTKKTTPKEVAFIENWINNY
PKKCLDYKSPSEFLLGG
>orf01426
(SEQ ID NO: 807)
MLHPIFIIRRSWDGIFHLSEWKRNEEFDFFNKMDVPYLSMSSRIEVTQAINFHKKHSISL
YAIISWCVMSAINSIPELLMDTDGKIVWQYNQRGCSFTTLTSEDKLNFSSFTMGDNLIEF
VSAFNINKQKAEEGQKPNIDKNNIAYLSCVPWIDFLHVSTPMNLSKIDTVPRITWGKVIQ
ENQRYFCTVNLQINHGMGDGLHVSNFFVLLQRFVNKINEYFQKK
>orf01428
(SEQ ID NO: 808)
MSIFIGGAWPYANGSLHIGHAAALLPGDILARYYRQKGEEVLYVSGSDCNGTPISIRAKK
ENKSVKEIADFYHKEFKETFEKLGFTYDLYSRTDSPLHHEIVQELFLQLYEKKFLYTKKI
KQLYCTFDNQFLPDRFVEGKCPNCGTHSRGDQCDNCSAILDPIDLVDKRCSICSNEPEVR
ETEHFYYVFSEFQNLLETYLNDAEETVRWRKNAINLTKRYLREGLPDRAVTRDLPNGIPV
PIDGFRDKKIYVWFEAVAGYYTASVDWAQKLQNNITDFWNNRTKSYYVHGKDNIPFHTII
WPAILSGLEIEPLPEYIISSEYLTLENKKISTSNNWAIWLNDIIKKYDADSIRYFLTINA
PEMKDANFSWREFIYSHNSELLGSYGNFINRTLKFIEKYFESEIPTKYLEGEILYNLKEL
YTTVGNLVESGHMKQALEEIFEYIRSANKFYDDMKPWALRESDIEKCKEVLATCVIIILN
LGQMLNPFIPFSGKKIEDMFKTKLNTWNYISNLPNKLSDVSMLFDRIDLKKIDEEVLELQ
QTSSR
>orf01429
(SEQ ID NO: 809)
LNNLTLLKEYNFRDLGNHLTQTGQKIKPKTLFRSSKLFGISKIDVDLLQSYGITKVIDFR
SANEIKKAPDPDIKNIKNIVIPIFYNDDSELTEFPIEFFNKSDAGFQHMIKTYDQMINQK
QSKLGYKKFFKLLLSHPKDESLLFHCSMGKDRTGIASLFLLYILGVDMNDIFHDYLLSNK
YLINVRKENIEYVNNHSGNVILMHNLLSLSSAKEEYINRVLNVLDKEYGGILRYINTELG
ISSQEIEELKDRYLF
>orf01431
(SEQ ID NO: 810)
MDFLNEVLDLKEFIQDPVRTLSLGQRMRADIAASLLHNPKVLFLDEPTIGLDVSVKDNIR
RAITQINQEEETTILLTTHDLGDIEQLCDRIFMIDKGREIFDGTVNQLKKTFGKMKTLSF
ELHPGQDYIVSHFEGLSDIYVTRQELSLDIQYDSSQYQTADIIQQTLSDFTIRDLKMTDA
NIEDIIRRFYRKEL
>orf01432
(SEQ ID NO: 811)
MTKLWKRYKPFVSAGIQELITYRVNFFLYRIGDVMGAFVAFYLWKAVFDSSHQSLIQGFT
LSDMTLYIIMSFVTNLLTKSDSSFMIGWEVKDGSIIMRLLRPVHFAMSYLFTEIGSRWLV
FVSVGLPFVILIAGLKLLSGESFLQIVLITTVYLLSLILAFLINFFSIFALVFQLLCLKT
YGDQIF
>orf01433
(SEQ ID NO: 812)
MKKYQRMHLIFIRQYLKQIMEYKADFLVGVVGVFLTQGLNMLFLNILFQHIPLLDGWSFH
QVAFIYGFSLIPKGIDHLFFDNLWALGQHLIRKGEFDKYLTRPISPLFHILVETFQIDAL
GELLVGVLLLLMTITSLTWTWAKVFLFLISIPFATLIYTSLKIVTASIAFWTKQSGAIIY
IFYMFNDFAKYPIAIYHSFLRWLISFIIPFAFTAYYPASYFLKDKDGLFNIGGLILISLI
FFTLSLKLWNKGLDAYESAGS
>orf01434
(SEQ ID NO: 813)
MIELAEPLPEYEILLSIPGIAETTATSIIGELETFVAFSLPTKSMPLSVLTSDTMNLAIS
>orf01435
(SEQ ID NO: 814)
MLGWKDGHEVPILFPCRSREKVLYFWKGNLKHLVQAILSPNDVFCQILIESTEVTQILID
FFLNISWFAVKDEL
>orf01437
(SEQ ID NO: 815)
MMRTVFRMDVSKASSEVAILVNGEKVHGYTMPNDAIGFSRLLEDLK
>orf01438
(SEQ ID NO: 816)
MKKNNVEIIKADSLVRRRGDNVERHLKRVAAYCRVSSDSEDQKNSYDSQVRHYKEYISQR
SDWELADIYADEGISGTQVGKRQDFQRLINDCANGEIDYIVTKAIARFARNTLDTLKYVR
MLKDMQIGVYFEEENIDTLTMDGELLLTILSSVAQQEVENTSAHVKKGLKMKMQRGELVG
FQGCLGYDYDVETKQISINKKEAKIVRYIFERYLEGIGGKVIARELDELGYKSPRGLEHW
NDTTVLGIIKNEKYKGDILMGKTFTVDPISKRRLSNFGEEDKYYIKDNHEPIISKEDFEK
AQEIRLRRAGNKKTAANVNGKRERYSKMYAFSSMLECGFCGSILSRRSWHCRSDYRKVVW
HCVTSIKKGKKFCKHSKGLEEIAIEGAFLEAYRQVYHSNENLMTDLLETIESELNDNSLN
KELKRITNKLRILLKKEENLVNLRLEGKVSDSIYNEKYNEISSEKEFLAEEKVNIETTLK
SEIDVKKRLTEFKHLLSSQKMLTEFDRAVFESIVEKIIVGGVNSNGEIDPAMLTIIFKTG
EIQNKDGKQFKSKRKNAKLETDKLCPQNSDEDKKLYSQGTDNTRGVCSVAGSILASQ
>orf01439
(SEQ ID NO: 817)
MGGNPPMKKYSIVDKIVLSTKIKRIIIFTVFRENWEPYMKKYTEVFQSQFPNLNIDYLLL
DTEQIDLDSYLDADIIIIGGGNTEKYIATYVNQEFKSYIDHMLNKEAKIIGFSAGALLLG
EKVYVSPNDNSDHQIKIKNGLGLFSQFLISVHYDSWNDKANKDRAEELVNVPIIPLNDHS
CLVLDKLGNIIEKID
>orf01440
(SEQ ID NO: 818)
MDDEASKQLSDSRFKILVGVQRTTFEEMLAVLKTAYQRKRAKGGRKTKLSLDDLLMVTIQ
YMRE
>orf01457
(SEQ ID NO: 819)
MGFSMKLIHDLDTHTTHSTAKMLYNVKAIKNDFSIRE
>orf01492
(SEQ ID NO: 820)
LILNEYEKRIFHEKTHNIECFDTCYYAFFIIFAPFLAFVIDKHCSSSLFLER
>orf01520
(SEQ ID NO: 821)
MSQVKGLCVLDVDGTLILEEVIDLLGREAGHEAEISQITSRAMRGELVFESSLRKRVSLL
EGLPILVFDNVFNSIHLSLNVPEFISILQKNGILVGLVPGGFTPIVGEISKIPWYCLFHC
QPA
>orf01521
(SEQ ID NO: 822)
MLKSAELGIAFCSKEMLKKEIPHHVDKRDFLEVLPLIDCLE
>orf01527
(SEQ ID NO: 823)
MGFSMKLIHDLNTHTTHSTAKMLYNVKAIKNDFSIRE
>orf01537
(SEQ ID NO: 824)
MDKLIIFIEKGKPFFEKLSRNIYLRAIKDGFISSMPAVLFSSIFILIAAVPNIFGFKWSD
EQLAFILKPYNYSMGILALLVAGTTAKSLTDSVNTRSMEKTNQINYMSTFLAAVVGLLIL
AADPIEGGFANGLLGTRGLLTAFLAAFITVNIYKVCIKNNVTIRLPEEVPPNIAQVFKDV
IPFALSVLSIYGLDLIVRNIFGTNVAESVGKILAPLFSATDGYIGLAIVFGAYAFFWFVG
IHGPSVVEPLIVAISYANIEANVQLVQAGMHADKILNPVTQTFVVTMGGTGATLVVPFMF
MWLCKSKRNRIVGRASVVPTFFGVNEPILFGAPIVLNPIFFIPFVTAPIINVWIMKFFVD
VLQMNSFSIILPWTTPAPIGIVMGTALAPLSFVLAITLIIIDTLIYYPFVKVYDHQILEE
ERKGNSSSELKEKVAANFNTVKADAILEKAGVDAAQNTITEETNVLVLCAGGGTSGLLAN
ALNKAAAEYNVPVKAAAGGYGAHREMLPEFDLVILAPQVASNFEDMKAETDKLGIKLAKT
EGAQYIKLTRDGKGALAFVQEQFD
>orf01552
(SEQ ID NO: 825)
LFKTRSNSSALGSSYISNRNIFSYFTNQFNNTFCNVFGM
>orf01557
(SEQ ID NO: 826)
MALTQRQFVELFQETINVITLTCLTVSVAVVACVSICSS
>orf01558
(SEQ ID NO: 827)
MLTMFLFLPIDFFFCTDIIRMSCILKVNIVFSIYLNHITTLDFTDNILVL
>orf01560
(SEQ ID NO: 828)
LVCYFDDDLFGIDSFTLANLIRSQILRFLRRLFSIYIGNTIISLTVLA
>orf01570
(SEQ ID NO: 829)
MGFSMKLIHDLNTHTTHSTAKMLYNVKAIKNDFSIRE
>orf01585
(SEQ ID NO: 830)
MEKYFGEKQERFSFRKLSVGLVSATISSLFFMSVLASSSVDAQETAGVHYKYVADSELSS
EEKKQLVYDIPTYVENDDETYYLVYKLNSQNQLAELPNTGSKNERQALVAGASLAALGIL
IFAVSKKKVKNKTVLHLVLVAGIGNGVLVSVHALENHLLLNYNTDYELTSGEKLPLPKEI
SGYTYIGYIKEGKTTSDFEVSNQEKSAATPTKQQKVDYNVTPNFVDHPSTVQAIQEQTPV
SSTKPTEVQVVEKPFSTKLINPRKEEKQSSDSQEQLAEHKNLETKKEEKISPKEKTGVNT
LNPQDEVLSGQLNKPELLYREETIETKIDFQEETQENPDLAEGTVRVKQEGELGKKVEIV
RIFSVNKEEVSREIVSTSTTAPSPRIVEKGTKKTQVIKEQPETGVEHKDVQSGAIVEPAI
QPELPEAVVSDKGVPEVQPALSEAVVTDKGEPAVQPELSEAVVTDKGEPAVQPELSEAVV
TDKGEPAVQPELPEAVVSDKGEPAVQPELPEAVVTDKGETEVQPESPDTVVSDKGEPKQV
APLPEYTGPQASAIVEPEQVAPLPEYTGVQAGSIVEPEKVEAPKEYTGKIEQPSAEDTKP
ENEASSTNGESERPKDKIKEEKQVDKKLELRNVSNVELYTVENNKYRHITAVDGALDSSL
KYFMKVKSENFKDIMLPVTKIESTTKNNKEVYKIVAHAENLIQHENNVISNDYTYYLPKT
QQSETGVYTSFKNLVDAMNSDPNGTFHLGATMDAREVELPDDQESYVKNEFYGKLIGENN
GKYYAIYNLKKPLFKTLNTATIQNLSIKEANVSSKEDAATISKEAKYNTLIDNVHSDGII
AGERGIGGLVSKVDNSRISNSSFTGRITNTYDTTAGYEIGGLVGKLSGSLASIEKSIASI
DIASNAKSGDQIVGGIAGVVEKSATIKYSYVEGNVNNVRHFGKVGGVAGNLWDRDSQDVS
KSGKLSYVLSDVNVTNGNAIAGYNFNGIKTIETYSNKNNKVVNVVQEDDEVVTKDSDVQR
GTVLDADKVKEKKVELVSKHSTKVEDFDFTSRYNTNYNEVTGYQQSREQVYKNIEKLLPF
YNRETIVKYGNLVEDNSDLFTKKLLSVVPMKNNEVITDINKNKQEINKLLLHFEGNKSRV
LNIAYKNDFSKVAEYDIANTKLMYTPNTMLHDYNNIVKTILNDLKSVQYSSADVRKVLDI
SGNIKLTELYLGEQFEKTKANIEDSLSKLLTADAAIVENNNKVIDNYVIEKIKNNKEALL
LGLTYLERWYNFNYGETNAKDLIMYHLDFFGKSNSSALDNVIELGKSGFNNLLAKNNVIT
YNVLLAKNYGTESLFKALEGYRKVFLPTISNNEWFKKQTKAYIVEEKSTIEEGREKQGKE
GTKYSIGVYDRLTNPSWKYQSMVLPLLTLPEEKTVFMIANISTIGFGAYDRYRSSEYPKG
EKLNKFVEDNAKEAAKRFRDHYDYWYKILDNDNKEKLYRSILVYDAFKFGTDKDKDKVTH
QATFETDHPAIKYFFGPAGNNVVHNGHGAYATGDAFYYMAYRMLDKDGAVTYTHEMTHNS
DREIYLGGYGRRSGLGPEFYAKGLLQAPDHPYDPTITINSVLKYEDSENSTRLQVADPTQ
RFNSAEDLHNYMHNMFDVIYMLEYLEGKAVANLETNQKYELLRKIENKFDLDQDGNNVYA
TNVVRRLTMDEVNKLNSFDSLIENDIITSRGYKDQEYKRNGYYTIDLFSPIYSALSGEKG
TPGDLMGRRIAFELLAAKGYKEGMVPYISNQYEKDAKAAGSKINSYGKEVGLVTDELVLE
KVFNGQYKTWTQFKKDMYKEREKQFSKLNRVNFINPNNPLSRQRNVSVTDIGVLERMIVE
AVRDDAQDDVAKFYPETNSRVLKLKKAIYKAYLDQTNDFRSSIFENKK
>orf01588
(SEQ ID NO: 831)
LSLLKKDKFSIRKIKGIVGSVFLGSLLFAPSVVGASTYHYLDYSSLTQTERDQLKQGRPD
ESKESYALDYEKDALPNTGSSQSIMTALGLLAIGSLIVIITKDNRNKKIATFLIVGATGL
VTLSTASALNLNANIHESGRDGVLQISGYRYVGYLELDDKTVSSVSPASTVSPVEQPKVV
TEKGEPEVQPALPEAVVTDKGEPEVQPTLPEAVVTDKGEPEVHEKPDYTQPIGANLVEPE
VHEKLAYTESVGTTGMDENGNLIEPPVSDIPEYTESVGTTGVDENGNLIEPPVSDIPEYT
ESVGTTGVDENGNLIEPPVNDIPEYTEPISTVSEVASEREELPSLHTDIRTETIPKTTIE
ESDPSKFIGDDSVKEVGEDGERQIVTSYEELHGKKISEPVETVTILKEMKPKILVKGTKE
NPKEKTVPVLTLTKVTEDAMNRSANLNYELDNKDNAEISSIIAEIKDGDTVVKKVDLSKE
KLTDAVQNLDLFKDYKIATTMIYDRGQGSETSKLDEKTLRLELKKVEIKNISSTNLVKVN
DDGTEIPSDFMSEKPSDEDVKKMYLKITSRDNKVTRLAVDKIELVTEKEKELYKITASAQ
DLIQHVDPSKTRNEYIHYIEKPVPKVNNVYYNFNELVRDMQEHPNDEFKLGADLNATNVS
AFGKSYVTKDFKGKLLSDGDNHYTIHNLSRPLFGNVIGGTIKNINLGNVDINMPWANQVA
AVANIIKGGTTIENVKVKGNIVGKDWVSGFIDKIDNQGTLRNVAFIGNVTSVGDGGQFLT
GIVGENWKGLVERAYVNANLIGKKAKAAGIAYWTQNEGNNNTVRQEGAIKKSIAKGTIQV
TEAIESGGVVGSMKHHGSVEDSVSMMKVPNGEIFYGSSDIDYDDGYWTGDNVRRNYVVIG
VSDGHSSYQRSKDKNRIRPISEEEAKSKIEATGITADKYEINEPVVNRLNRLTRREDEYK
STQDYKVDRDLAYRNIEKLQPFYNKEWIVNQGNKLAEDSNLAKKEVLSVTGMKDGQFVTD
LSDIDHVMIHYADKTKEIKAVHQKESKVAQVREYSIDGLDDIVYTPNMVDKNRDQLIKDI
KDRLATVELISPEVRALMDKRDTSRDPNANSDERKNGYIRDLYFEESFSETKANLDKLVK
SLIENADHQLNSDEAAMKALVKKVDENKAKIVMALTYLNRYYDIKYGDMTIKNLMMFKPD
FYGKSVDLLDFLIRIGSSERNIKGDRTLDAYRDMIGGTIGKSELHGFLDYNMRLFTNDTD
LNDWFIHAAKNVYIVEPKTTNPDFVNKRHRAFDGLNNGVHNRMILPLLTLKNAHMFLIST
YNTMAYSSFEKYGKYTEAEREAFKDKIKEVAHAQQTYLDFWSRLALPSVRDQLLKSQNRV
PTPVWDNQNYHNVEGVNRMGYDKNNKPIAPIRELYGPTWRYHTTNWYMGAMASIFQDPNN
NDQVYFMGTNMISPFGISAFTHETTHVNDRMLYFGGHRHRQGTDVEAYAQGMLQTPDKSG
NGEYGALGLNMAYHRENDGDQWYNYDPDKLETREDIDRYMRNYNDALMMLDHLEADAVIP
KLHGNISRWFKKMDRQYRKNGELHQFDKVRELTEDEKKKIVINNIDDLVNNNLMTKHGAP
SDRTYNPEDFDSAYVNINMMTGIYGGNTSQGAPGAASFKHNTFRMWGYFGYENGFISYAS
SKYQGEADKTNKKLLGDDFIIKKVSKDKFNNLEEWKKQYFKDVKSKAEKGFTAIEIDGRQ
ITNYAQLKTLFAEAVQKDIDGMSDPKIKDHFKNTVDLKSKVFKALLKNTDGFFNKLFKED
I
>orf01603
(SEQ ID NO: 832)
VLGGRANSVTSCTTNSHWNLTFTTKHVTCFSSLVDDIVHGNNREVHEGHIDDWTKSCHGC
SCCCSRDGSFRNRTVTDTFWTKFFKHSNRSTEVSSEDTDVFSHQEHIFIATHFLRHSKDN
GVTEGHCFCFHFISFSLVCVNIFKG
>orf01604
(SEQ ID NO: 833)
MDMFYIGHFLDIRRDTVTVVNAIENDWQVPDRSHVHCFVENTFIGRTISKEADNDFTGIL
HLLTEGCTDSDPHTTTYDTIGTKVPSIKVSDMHRSTFPFTGSSVFTKDFSHHSVEVNPFS
NSLPVSTVV
>orf01606
(SEQ ID NO: 834)
MNXXDFIGHCDKIKRNIFEKSHKVFSGLFGLHPKDFLNLIFSNQIPLPFSECNPLTNYNH
LFSLIISDKRDIVIHWI
>orf01622
(SEQ ID NO: 835)
LIEIQVFSSLQVCCLNLCHLKFQHFDTCLVFLLVFLDFQNLLAHFPIGIKTRLIGFFQVP
KSGITKFIQHLDMQLGTH
>orf01623
(SEQ ID NO: 836)
MVMLTMNIYKMLPNSSQNRQINHLTIYTADTTTILQDFPTDDNFIT
>orf01624
(SEQ ID NO: 837)
MTNNICRRTSSQHHIHGINDNRLPCTRFTSQDSHPLFKIEGNSLNNGKVFYRNFK
>orf01634
(SEQ ID NO: 838)
LFVIRNPSSQTLFQTQLQLVQALQITVIQALRLSKDNRLTAFFQSLLFLR
>orf01636
(SEQ ID NO: 839)
MPHTRDNWQTRFKNSSYHNFFVKGPEILNRTTSTTNNEQIQIVPLISTRNISSNFLRSPF
TLNLGRIKKDVNTWESPADGRDNISNNGSTTAGYYPNSLRKLGQSLLEAFLKQAFFCQFF
LKLFKLNRKRPNPIRLNFFNDDGVATTWFIDLYTPNHIDLHSFFQVKP
>orf01637
(SEQ ID NO: 840)
VTLADFVADRRAATPTAAAELATPVTKVGCISSFAKSGKTDGNGSPKCSI
>orf01640
(SEQ ID NO: 841)
LAIIRNRTCSLKLINDHLTFWTLRFLTSTRILIELATINLNCRIHRGNLSNRPSQASNRF
INKLFIQGRQNRGFCDHFPTSILSRRGIAQSDFPLIDLTLVLHKLDHACRLANRNRQNTH
HIRIQGSTMTNFLGSQNLTQFKNRIMRGHSCFLF
>orf01642
(SEQ ID NO: 842)
MEDDLNYENLMDDVTEAIKKFNLVIFIGAGVSIAQGYPNWNNYIEHLIKYWQGQVLSVSG
EKRLGREHHVVFDLISKSSISNKRKVDLVNYELKKVFGEDFEKRRLDFEKGYFKNLLPYS
IVNQTVESLASLNAIFITSNYDYEIENHIKRLKNAVVTINDLNEFTKNKNGKLQFGDVLH
IHGTPDCDVKYFVSSSADYSKTYLKNRENFENLVTWFKETKPTVLFIGAGLEEDEILSLL
CKDSKNYALMKSENTGNQRVDEHYRGVVEGFFSSENHTQIIWYGDEFEKLPLFVKKLVAD
INEKLGTHDFYNQWNNLLNPSINQEEYNKNLDSISNDFKYLSSVLDKVIENDNNQLDQLM
LNALLRSETLTVIKKNFVLVFWKFIVKNIEKLSDNEWDVIYKIIYEGSQNYFIDDVFFVY
NYAIDNKISSFTNNNKLNELREIISKDGYIVNSNFNKDKTLLGYWLVSAFEQQNRDLYIK
EDSEVEVNLNYECVNKLMSILNNPEFLSYNYYSIEHQLKEYDVVKFLYELVKSKKLFIEE
EKFLESDSEDLISTILIQKLLVQLDNEINLDLEFIKRLIDKIDFSNIHFGEELNTFIKEH
RSIIREKNIEIPKKPYRNWISSLEGGFVSQFSYLTQENLVEYDESRVLEILVNAEKEQRG
SSFLEEKTINETENFFITVLKESNEISKKVSDLLKNHIDDLYPKYKRLYVKIISFPEIEE
NLRKIVREKYLKRFNKESFDSNDRKFFEYHIKQQNTDIDIFEKLLSINVNELSTPKGDNK
QLDILHFINSEMGSYFQCLISLFINHSSYRDVIIQIINSVTDTDYREFAQGILLNEYNPN
RINVTYNTFLGFAYYHSTITIEAADVFTDVVRDILNKKIEDNQILNKVYLVALERVDPTI
ESFSLSKNNYSQMINIIFTGDYEFRYSKEWLGALFKFDSSANYLVTIFYLLYNENLKKNR
FALFIEELSDYLTTYNQKLSLRGMNYKLNHEELNNFDLLKKMFLKLMETDKIENDIFYLD
GIKSILPLLSLDDRRNVLQHIQKQNNCPPPEIEELQRIIVN
>orf01645
(SEQ ID NO: 843)
MFMSNLCQFFQVWNINQGVTQGFNQDKLGIVFDSCFYFLQIINIDKGCCDTITRKEFFQK
IEGSTVNSRSSHYMVTSMGKRQNRISHCSHT
>orf01646
(SEQ ID NO: 844)
LINVFSHGVDIAIHSATKFIGGHGTTIGGIIVDSGRFDWMASGKFPQFVDEGSSCHNLSY
TRDVGAVAFIIAVRVQLLRDTGAALSPFNAFLLLQRLETLSLRVERHVQNAETIVDFLVN
HPKVEKVNYPKLADSPYYALAEKYLPKSVGSIFTFHVKGGEEEARKVIDNLEIFSDLANA
ADAKSLVVHPATTTHGQLSEKDLEAAGVTPN
>orf01647
(SEQ ID NO: 845)
MTCDFKFETLQLHAGQVVAPATKSRAVPIYQTTFFVFDDT
>orf01651
(SEQ ID NO: 846)
MAWLLVGNVGVRQVLEHLNAELKKVMQLSGTQNIENVKPFNSVTSIKPTLPNDPPDLKFI
DKKNAPPKCGVFLCYGKKFVLKNKKNEIRIGRIVQDSQIDF
>orf01656
(SEQ ID NO: 847)
LKKKWFFADYYDTTIILLALISVILVLLGFAEMIDLDNPPYSIIDLVIWGVFVIDYSWRF
FITKRKWRFILENVFDLLAILPLNAIFTVFRLGRIFRLARLTKLLKLTRLLRIIGLTGKL
ERKISRFLRTNGLIYILYVNIFIVLVGSSILSVVEEKSFSDSLWWALVTVTTVGYGDIVP
VSLFGKTNYRAKEY
>orf01666
(SEQ ID NO: 848)
VVDFKQTRQDPHDITIYSWLRQVKSNTGNGSCCVRSNPFQAGNSFIGIWKLATKVSHNLL
GCSLHIANSRIITQALPSFQ
>orf01671
(SEQ ID NO: 849)
MAERTVVQVHNAFPEDTTLINSQLIPLVQVVVNQGRKGIVGSCNSMHISSKVEVDVFHWQ
NLCIPTTSSTTLDPHDWTKRRFADSNHGFLANLVQGIRKTNGKRRLSFTCRCWVDGSNQD
QFTDWIALNCTNFIKAEFSLVLSVQLQIVVRNTKFLYNINNWLQLNTLCDFNICFHSKFL
>orf01684
(SEQ ID NO: 850)
MLFIIGHLNFPTAGSFIDSTLHRLGNRVCIHDDMAFTVTSSTSNSLDESTFVAKETFLVS
IENSYEAHFRNVNSFTEQVNSDQDIKDTQAQVTDNLRPFQGLDIRVHVLDLDTHFLEVVG
QILCHFLGQSCDKGTLIFFNAGIDFTQEVINLSHSRTDFHLWIQESRWTNDLLNHCLGLF
IFIVTRCR
>orf01685
(SEQ ID NO: 851)
MNVTLKLLPTERTIVQSRRQTETIINQHFFTRTVSIVHALDLPYGHMTLVNHNQEIIWEE
VEKRIRRLSFAPSIHVARIIFNPIGIAHLTQHFDIILCPLFQTLGFKQFTFLFKDS
>orf01686
(SEQ ID NO: 852)
MIHFSQHLTCQSLNFTNTVNFVSKKFYSKGMFISGSWENLYHIPTNAKSSALEINIITFK
LNIDQVIQEFITRNL
>orf01687
(SEQ ID NO: 853)
VAKLVNLVIDRTILLNIGIARRDIGLWLVIIIVGYEILNCIFREKFLKLPIELTSQSFIV
GNNQSWFIDFRNDLTHSIGLPCSSRPHQNLSFFSPLNVIHQLLDSLGLIS
>orf01705
(SEQ ID NO: 854)
MNITQTDFLAVNLVFAISTTIDMAFHPDFLTCILDKSVMIIQSHNYRSIIERFATFCSSK
DDIRHLAPTETLDTRLPQSPTQTFCNIGLSRSIGSNNCRHTLVKNDLGLISKRLEPLNFD
FL
>orf01707
(SEQ ID NO: 855)
MSFIVCNHLKFACFNLRNHDLIDKFLDLGHILIQKKGTKKGFKGITKNGVTIATTRFFFP
FTQLDKLVKLAITRKTS
>orf01719
(SEQ ID NO: 856)
LFTCFSKLDNKTASTTYISHKFFTAIPVCFEFFKGFWFPRKDTTKKNIFIPMFLVECFNF
WVELR
>orf01726
(SEQ ID NO: 857)
MTKKIVALAGDGIGPEIMEAGLEVLEALAKKTGFVYEIDRRPFGGAGIDAAGHPLPDETL
KACREADAILLAAIGSPQYDGAVVRPEQGLLALRKELNLYANIRPVKIFESLKHLSPLKS
ERIAGVDFVIVRELTGGIYFGDHILEERKARDINDYSYEEVERIIRKAFEIARNRRKIVT
SIDKQNVLATSKLWRKVAEEVAQDFPDVTLEHQLVDSAAMLMITNPAKFDVIVTENLFGD
ILSDESSVLSGTLGVMPSASHSENGPSLYEPIHGSVPDIAGQGIANPISMILSVSMMLRD
SFGGYEDAERIKRAVETSLAAGILTRDIGGQASTKEMTEAIIARL
>orf01727
(SEQ ID NO: 858)
VVRNTASHLTCILFLNKGISVYIGNSRSLKHIKIKPCCIKDGFCISVFNSDQNPILGIDS
ICYRIDSVGHQTNRLVKELIDSIKDCFNGTLPCRIKFDFLTIHIG
>orf01729
(SEQ ID NO: 859)
VEAFWIFNHGSSYQSSNICICDFLLLIGQCLELSKEWFDILFCKI
>orf01732
(SEQ ID NO: 860)
LANIESHCNFFQSSISSSLPNTIDSPFNTSCTILDSSKAICHCHSEVIMTVRRIDDLTIR
LDILNQVFEDGTIFL
>orf01741
(SEQ ID NO: 861)
MQEHYTPKGKHLTIDNRRLIERWKNENKSNREIAGLLGKAPQTIHNEVKRGTTLQQVRKG
LYKKVYSADYAQTVYQFNRKRSVKKLILTKEIREKILHYHKQKFSPEMMVNKKQVKVGIS
TIYYWFHNGHLGLTKADMLYPRKRKGVKKQASPNFKPAGKSIEERPDVINLRLENGHYEI
DTVLLTKIKNYCLLVLTDRRSRHQIIRLIPNKTAESVNQALTLLLGEHRILSITADNGSE
FKRLSEVFPEEHIYYAHAYSSWERGSNENHNRLIRRWLPKGTKKTTPKEVAFIENWINNY
PKKCLDYKSPSEFLLGG
>orf01752
(SEQ ID NO: 862)
VHAHTDKLCNGCNRIFNSIISHHTIFRERNKLSHKAIKSTRQEMGPCHVVFIEFFITLHR
RLIGNHDNFLTNLVGSGRVRNDGST
>orf01753
(SEQ ID NO: 863)
VNHCHWELFIQNLGITFSLIVTLIRMTDSHVVGTDKDMIFLVNSLFLIFDIDKLRLS
>orf01755
(SEQ ID NO: 864)
VGNNDILWSKRTISINGFNDFLNTCIAVSTTLCNDDTFLIKRKIFIYKIFCMRNPVSMNT
NYNFFNTWLQDKFFNCMNQNRSIT
>orf01765
(SEQ ID NO: 865)
LVAPVASSTRFFKNNDSLTSWNNGFIIITINTIISYQRISKGQDLSIIRLVCNGFLVAGH
PCIKDDFACYINICSEGLAFKNCAIF
>orf01767
(SEQ ID NO: 866)
VVCYFYITIDWSWVHEDCCFFQTIVTFLSQAMLGMVVFF
>orf01768
(SEQ ID NO: 867)
MAFVLHTEKHHDINLINDFINGYKLSIVCKLLTSPFLRSSEKEFRSQAFQNLHIGFGNA
>orf01769
(SEQ ID NO: 868)
VVQVTCNSNFKTLKVAKFLINGHQIKQALARVLARTISTIDDGSRNRWTSNQFSIVVDLW
MANHTDIHS
>orf01770
(SEQ ID NO: 869)
MCPCRILKEEIGNNRMVFIGKLGSIFKLNSSLDQFHYLIDSEVFHGHHMVQCLLIF
>orf01776
(SEQ ID NO: 870)
MSINCKGWNPKSYTHDNIGCLATNTCQTLQFFTCLRDLTIKIV
>orf01790
(SEQ ID NO: 871)
MPDCTLTNFLDKVLYNRQGNVGLEQGQANFFGCLLDIRFRDFSFFT
>orf01793
(SEQ ID NO: 872)
VQFHLIIFQNLFCSLDIVIDSLTTDTELLGNFSKAVIISVVELDIIHLLICQKRRIKFKE
RIHTIGFFDFHNFYYTKN
>orf01796
(SEQ ID NO: 873)
MKFNHYFFLFLIIEKQVAIISFFMHFHIIKLVNHFQLLIKLNCISHPNLHIRPSFLSLVL
LFYQKEQDFAIMVI
>orf01799
(SEQ ID NO: 874)
LANNRKTETLGVSYLSTFIDKHELLQSYFESNDKTPVWDGEIHVLKSPSEKKDEILGKVP
VQIKTTRQKKDVLKSFSLDTRDLELYKPNGGVVLFVVWLNEDNGLRDIYYKSLPPLSIKN
LLKKSKLKNKSTNRKKLSIEIFKLDEKKMYPMLVDFINNSQKQYSFINVEGISVEDIPDD
KTLKFYFYGQEKEEIFNYQEEHDLFIYYLDPITGIEIPLENTIKIVETEEETDLIIKIGD
YVFQDVKRHRFPDGSVQLHFGESFTMSFDIKKKQFKFNYTRPDLLSKAIKCTQVFQELGK
IGYFTLNGNKIELDERSIKDISSLDLEADIKGLLKISNFMKKMGIQKDVDLSCFDKQSQR
NLNILYSGLVLKKKVALNYNESKLLHLNIANIHIITLYSFLSDKNGTMIDIFTETPWCRE
GETEDEDYLDISIFEVFEPNDWLKIDNCKIDSVIASYQRLVDNKLKYEGADRTILKIVIA
ADMAEDKTKRELLLNWAQCLSDWNLKYSKNCEMAIINDLQIKSRVRKLNSKETETLTNIL
VNSNDNYELCFGSSVLLKSKPQADLFWNKLDNETKERYKDFPIYTLYMKLS
>orf01800
(SEQ ID NO: 875)
MKVSKKITLFSLSFAGFVLLTLPQAGKAFELKEDWAFKGGIRYENGKVSKINNGYEVNIK
VLDLPSTSAIEWTVRLNGEKQNTNFLAEERTVSKTEDKGRFLHFYIPYGYRGDIVVEAKS
GNEVKTWSTKVVDDVYSDSAKSGYFILDGEQILESSWDSVNESYIATLPTVTSGKTVVAW
REKGTLNLIKPGRIARQYNSSGSYVELSPIFETASWLKSNQNWYYQKQGQLVQNSWIKDQ
GSWYFMDDEGVMFNQTWLHQGGSWYAFKSSGAMISADWLYDNGSWYYLKDSGSMVTGWLK
NGGSWYYLNKSGSMATGWIKDSGTWYYLKNSGSMATGWVKDSGSWYYLKNSGSMATGWVK
DNGKWYYLASSGNMLRNTRTPDGYYVDGSGAWK
>orf01801
(SEQ ID NO: 876)
MKKILLSTVALLSLVASLLANNPVSAQESSSQATYSKSSGSWIKSGNRWWYKHSDGSYTT
NGWEKINGTWYYFDSEGWMKTGWIKEYGKWYYLDDSGAMKTGWCLVSGSWYYLNSSGVMQ
TGLQTINGKQYYLAAGGAMQTGWHNIGDDTYFFANSGENQNINRRALVLGETSTRAVPIA
DVNAMEKVFNNQNFSEVVRFPDRTKSEIIAKMQELFESSSEGDVNYLYFTCHGGRDGRIY
IGSDGLAFSGWELASVLKQYKGKFVVMLDCCHAGTIISKDNTGEGNEGASTEYFDLDEFV
SGFSNMDGNEKSGEMIDSKFLVLCSSRGAEYSSGGSLSLATKYWSLGSGWNPLQNSQAYL
AADQNNNRRITLNELYTYSREQVLKQNSNQHIEVYPDNSQFVLFKK
>orf01802
(SEQ ID NO: 877)
MENFGAVLKDIRISKNFRLKDLSCNEISESTISRFENGITKLSINHFYILLNRLGISFSE
FEELVHCYYSKKECLFEELEHAVNSSDIFLLQELVDKIELKQKQEKSLCNYHIKLIAEQQ
INRLANLPYNSSKCNELIKYLLSVDTWHEYELKLFYNSVFFMNTRTISLLYRIVIKKTRY
FLKTNTGTHRIIPLYLFNLKLLLKNNLLGSAQFFIDDLENLLTRQGYYFEKNYLLFLKGI
YLIKTNQIELGKKECFKAMRIFKEYNDSDTINELNQKFKLDLTI
>orf01803
(SEQ ID NO: 878)
MSSIYSSAKKDFLYWNVLIFIMELPNDVKVQFYELRKKVQSFNQLSKRFGMDVSG
>orf01810
(SEQ ID NO: 879)
LSFLILSPAGAQESLSFFFVKITDASKTVKNGGQTETQKLVTKMASDFERVENKDSEVGK
IVKEKLALSGDITEAKLTEISSALLAFEKEQNPVDLDAEKEKLVNRLSPRFETLEQAIAS
KDLEKVREAFKKMNSTWTINESVVRDNSTAHYGRVETAISFLPSSMETEPTDESGT
>orf01812
(SEQ ID NO: 880)
MQKNIYFVVLDLHTTDRDKIIQLFKDWTDYSAKLVEGELVKKDGQNALFPPSDTGETVGL
NPHRLTLTFGVSASFLKRMNLENKRPRLFRDLPLFPKEQLREKYTGGDIVIHACADDEQI
AFHAIRNLIRKGRNAVPLRWSQSGFAAIGDRMETPWNLFGFKDGTANPTKEQDFDRVIWA
DSKDWMENGSYMAVRRIQMFLETWDRTSLEEQENTFGRYKESGAPFGKNNEFDEVDLSLL
PDDSHVCLAKEVDKPLLRRSYSYSDGIDEKTGQFDTGLLFISFQKDPDNFVKVQTNLGAT
DKMNEYITHIGSGLFTCFGGVEKGGYIGQKLLEG
>orf01815
(SEQ ID NO: 881)
MTGKKGFLFLNCHICMVTTTICFLKERVESELLIFFYISLNRCLITV
>orf01818
(SEQ ID NO: 882)
MSLRNKIEQHIKELEGGKFQKLGDAYLSRKYNFNIVSLGSQEGTDKTTKGIPDSYAVENG
KYVYIMYGTHKSVISKLEGDIQSVKKKILEENIAEDKVGRLICCHTSSNITIKQKEDLEK
MAEPYHLELIGINEIANDLTKIDFQYLAKEYLSISESTEQVWSINDFIRIHDESKTNAPI
SNDYIGDVSEIINTIKSSEKRIFLISAKPGTGKTRLAIEICSLLDRNKYNIICVKSNNQD
IYQDVKRNLNLHKENIVFIDDVNTIQNYISTLGLLNTTSNIRFILTVRDYAKKDVINNIK
VYGYNNIEPELIKDDNFKELLNQFSRNDFTNQEIEHIKTISKSNPRIAVIAAKLSSSQDL
TNFNDEIDILKDYYEEILNKNNIIYAEQKTLFILSYLKKIRLESLEENQEFNKLLKITDI
TNTDFKSAVEKLHERELCNIYNDKIVKIADQSLDDYIVIKFLINKKISILEILHELYPVN
DQRVVQILNQCSNFIRKESDLEGVSDAVKSYYYNESNFESDELKEKFLIQFGVLLPLEAI
SHVKNKIDNIESQVYTKTNFINQKDKKGSIEDSVLNIVFVTTRTKYCSQILQLLLKYFDK
NPNKISEVYSILEANYGLVTEREYIDYTLAENTISELANLDLTKSYNQELIVTILKQFLK
IEIERTEAHEEKFTFGRYKVPDSEKLKQYHRSILKLLANLYNIGSCETRFYIEKMLYDYR
RKILTYSESHRNTIFGDLRNIRKLFFNDIKNLSMIGEKIVYALHKAEVKENLPIVFDDYI
ISDRQKIYNNLTNPNHAWFYDASEIKLQQIANSYSNVWLKIFNFANQFKHSLFMNDNNIE
LVLFNMFLLSKNDKKIKFLNYMFKSNYHFVNMNPISFLENIEESSMQSVIVSSPESEKYE
WQLAYLTQLENVKNEDLQTLKSILEANSLPCYFTILNFERLILKDPSLKELLIQKAGNTN
FVISDFIREEEVPKLINLIGVKELKFWYLINLENCQNHSYNLFQKLGEKDVDFSVEVLKK
IDELRIGHSNLGYMVLHSISEFRDKKEIYKKFIRFAINRPYYYYNNMIDDIIKNDSQIIL
EILEETNNEQSAIRLVNLGVEFLENNNQKLILFNLLRAKGFGKKSFQEIHFTPYSHFYTG
SHVPVLELEKELLERIKKIFETGIDYINLLLYLNKLIDCKRKAIERELEKEF
>orf01822
(SEQ ID NO: 883)
MNESLDDITHKQFTSNLTTKADNVSVQLFFSIKGCCHITNQGRTYTWNFIYSVVDTNTSS
TDTYLKISLAASYSFPYFFTKDWVESPCMVICTKVNDFISF
>orf01824
(SEQ ID NO: 884)
MAISQMKRISLLFSKSSLDDVLKTIQELESVQFRDLKVQDNWSEALEKDEVVFPTIQISH
TSNSNHGVIEGNDALIYLMNQQQYLEATVEKLQEYLPKENTFKLVRQPPITTSYKELEKL
VKLMLPRVFLKK
>orf01826
(SEQ ID NO: 885)
MNRACIIQPSLVEIQIWLLNHVCKCSDFLSHRMRSLLDRKLDLISLLIKLFPKKNWKN
>orf01828
(SEQ ID NO: 886)
LNGGEFLETEFGHSVLAIQSVVWFSFFCLKSNASSLAHGI
>orf01829
(SEQ ID NO: 887)
LLAGILELENWGKTTELRPTLLSGPVQNKIEALKRAKI
>orf01834
(SEQ ID NO: 888)
MRSQNHNCRPSTRKVGCIGPIFFGHLLNHRKFSYQVLTITLMEEVSLDCLPSGHHVSCQQ
GSNRYIGDRTCSNSFLIRQFFRQDTTAVAST
>orf01861
(SEQ ID NO: 889)
LRQNRCYNCFHDHSCSWKSSRITSLHGCLVRFVGFDIHTHKRFIKSRNGFHDPTNNDGLP
ISHTTFKTT
>orf01862
(SEQ ID NO: 890)
LAAFTITSLKAKTKFHPFKGIDRDNSLSQSCIQFSIPLDIGTKTNWNASDDCLHNPTDGI
TTTFDLVNIVLDFLFSFLVDNRNFRLGSSLLNFSDCQIFRNIYFLTTKDHDMVGNLHIQL
SQEAFGYCTNCHPHGGFTS
>orf01863
(SEQ ID NO: 891)
MTWARMSNFPLAFKAVFNVLRRHDVQPFLVVLIDDIHSNRRPCRLPVANARSKDNLVTLN
LHTTTTTVATLTASKVLIDILSCQWKSSWNSLNNSC
>orf01865
(SEQ ID NO: 892)
MHDLAITGSRFDGMANSVAKIEVKTNTIVQLIFNHHLALHLTRMFNQGLCMFQNTLNRTI
QSRQESPQFWILNQAILDNFTHPFNQLSFSEGFNNKWINQNPIWLGKGPHHIFSKWCVNA
CLSTDRRINLSCQTSRNLNKVNTPHIGRGYKASQVPNNATTKSNDSIATSQTLLD
>orf01867
(SEQ ID NO: 893)
MVICHNDYLLRLPEFSQPLTSLGHTTFFNLNIIRMMRNIDSDFHRRVSLSLLVFFC
>orf01872
(SEQ ID NO: 894)
LIEGHLVFADKPAQALVLLRKVGSPKKVSFLTLHLYFLILKIDILKITGF
>orf01882
(SEQ ID NO: 895)
MSTTTKFNRVVTDSHDTNFLAVFLTKEGHSSHFFSSVNIRFHCLNFKSFPDFFVDLLFNR
TQFFSSYRLGSG
>orf01887
(SEQ ID NO: 896)
VTWIHSHFNPAVVRIFIVWIVGHVKFFSREIKPFRACQKLISPSDSFVTEVIPDREVPQH
FKHGMVTRSLPYVFDVVGTDSLLGIGNTWIFRDNGPVKVFLKRLLPQS
>orf01906
(SEQ ID NO: 897)
MNGHFLLLFCLFNIFFHLVNIELSKQVLTVLDWETLVQXXIPFIN
>orf01911
(SEQ ID NO: 898)
MRLRDLRRVDFPDPDGPIKAVISLGWKDRETLFKAFFLL
>orf01914
(SEQ ID NO: 899)
LKNHSNVFTHFINVDFWTVDINSTIENLPSYFSNINSIIHAIETA
>orf01915
(SEQ ID NO: 900)
LHINPLNGFIFTIVNMDILSRKGYFFFRKGKDMLLIPVIC
>orf01920
(SEQ ID NO: 901)
LSPFQHCHSSGSIFFNLHFLNRNILQSFDNPFLGLIRENKIEKFCSQLIGLPQCIHMLIR
PQGPIIATYIFWT
>orf01921
(SEQ ID NO: 902)
MNXXNSRCNHPTWSNFLDILEVDFLGNIVGQKIRSHDLKNPVQVFTVIDMTIHIQVVKTN
MVILADRLFQGFILRSTDKFFIKIRLVRSHNLRFNNMDFSTVAVHENKGRHHVDELLPRF
IINSKATVAKKSIVAQGFRFDGNFFRKTRQTNHLNIIFCDNPDQIIVFQNGLITNSQFNR
LHP
>orf01930
(SEQ ID NO: 903)
MWYFYNTDGSMATGWVQVNGSWYYLNSNGSMKVNQWFQVGGKWYYVNTSGELAVNTSIDG
YRVNDNGEWVR
>orf01931
(SEQ ID NO: 904)
LTFIKSWAIEIFCFDWNFLDKNLGLGSFFNNSCLRVFFLT
>orf01932
(SEQ ID NO: 905)
LLLSCRKVIVCFIFSSKWNKNFFNLAFSWNFDNCIRGFFSINSNLFGNITSLWINIVGPC
RSYIAILSINCNRIFTTVFCFIFFITNSRT
>orf01949
(SEQ ID NO: 906)
MRFIVGRFTSFSLGIEFSPTSKLDDLLFKIAFLMILATWIKARKTKGAT
>orf01961
(SEQ ID NO: 907)
LVNCEPLEAYRQLEEAELVGCWAHVRRKFFEATPKQADKSSLGAKGLAYRDQLFALERDW
EALPADERLQKRPAPNGRLLCLVPPSVSFSRFKTRKGN
>orf01963
(SEQ ID NO: 908)
LKRNKIWKKTLTYPVEREEITYKRKKAKGKRQAILAQFDSEEVHHRLENCICPDCQGELK
EIGASLQRQELVFILAQLKRVNHIQHAYKCQTCSKNNPSDKIVKAPIPKAPLAHSLGSAS
IIAHTIHQKFILKVPNYR
>orf01964
(SEQ ID NO: 909)
LKIIQQQSATIDSLTNELALLREQVAYLTQKLYGKSSEKSVCPSGQLSLFEEEQNMEEDS
DLPS
>orf01972
(SEQ ID NO: 910)
LICQTIKYWHKFHLHIGRCKLLIGLIPILNFFIRADIDCLLVLLSLIDRQNGKQFNLCQW
IIASNGLNDSFEIIESLIHRNILSDIICPNQKKNFIYCSTI
>orf01978
(SEQ ID NO: 911)
MSFSCSDSCFSILLLDGDIHENTTFSPLSILFISHRFNSLIGNEVPHLIDNELLISIFFH
RFRWFNNVRMPSKDNIRSPIDHLVIKSFLFFSWFQSILNTHLKHDNGDICFLLCPFNFSL
HLIFV
>orf01981
(SEQ ID NO: 912)
VVEQIPVGHNSGSFFLFLLLRLLLSPLLRNSISFLTSQGIPWKLSNNKTKPIDKSTASKS
IATNPLLLHLR
>orf01988
(SEQ ID NO: 913)
MLKLIIYQFQYSKRQWLGTIPLLFVSSLIVGTSLFGIASSIKTANINASQLFQMLIIFGG
TTLFFLISNNIRLLIDIFKKDYQLWTILGASRTQLSLLVSGQFYLMAVIVSSIGTILSFI
MADSYYKFLQNLLGRDELPDLVITANIQSILLSIFIVPTIVGIGAYFYSSRILKISSILK
PKKKKRKVTVTGFVNISVRLFLWLLCIGSIVSAGFIRNKEIIEKQSSIILFLLIIHILII
QSLSPSIQMFLIKFLMRIFPTENYVINTGFWNLLSNPSYLKSIQTSMSMGVTLISGFILY
TQNMYSFMNTANGVNEARASFIAYMSAPIILIITSSISLTILSSNKDIEDIKQLKTLGVS
RLQLFKIRIGEAIIHSVLILLVSVIFNLIILILVSIIGQFLGRSLVDISGFWQPSLIVIS
LLVIFYSITKGFYLFQDR
>orf01989
(SEQ ID NO: 914)
MVNNVAVKVSNLSKEFLLGQDKTVSILKDISLSVNYGEFVSILGVSGSGKSTLLSCLSSL
SEPTSGEVVINGVNPYTLKEGKLAKFRRQDIAIIFQNYNLVPALPVLENVTLPLRLSGKS
VDSNKVKKMLDSLNFKAELSSLVATLSGGEQQKVAITRAIIADSKIIFADEPTGALDSVS
RKLIFETLRNLASQGKCVLMVTHDIELASKTDRALILKDGKISRQIIKPSADELYQALES
SKD
>orf01994
(SEQ ID NO: 915)
LALVRKFIDYFFGVLVPFPDLYVFKSCFKFAGSFTDFDTFDWWLDWCRSCSENRFFV
>orf02006
(SEQ ID NO: 916)
MPTILLLKKFYERLITNFFRLKFLFCKEILATNIFNHPLFEPDIRVITIKII
>orf02009
(SEQ ID NO: 917)
MXXGAFGQGELLLQQSRNSSITEIVSDSWAGAGRRILPLPKSVTPLVSS
>orf02013
(SEQ ID NO: 918)
MLLLISLTQLIIFLFFERFNLLLKTFLLVDLKSNKSA
>orf02022
(SEQ ID NO: 919)
MAGKKGFLFLNCHICMVTTTTCFLKERVESELLIFFYISPNRCLITVYSVLNL
>orf02029
(SEQ ID NO: 920)
VIPRYVTKHQGWDHNPHTITNSDDDPATLVTFRTFKFNVGNCTIPKNDQNGSSQKFSGIL
QCPCEIHLLDSP
>orf02034
(SEQ ID NO: 921)
LLVRKFNIQTFFIQVFILNDFGYTVNGLIVYRLLLTSSILSFNDYSIGSFRTVIVI
>orf02040
(SEQ ID NO: 922)
MRLSIQLIHDLNTHTTHSTAKMLYNVKAIKNDFSIRE
>orf02048
(SEQ ID NO: 923)
MTAQLPSDALQMALWRRKRPRNVIVHTDRGGQYCSADYQAQLKRHNLRGSMSAKGCCYDN
ACVESFFHSLKVECIHGEHFISREIMRATVFNYIECDYNRWRRHSWCGGLSPEQFENKNL
A
>orf02093
(SEQ ID NO: 924)
MEIVLVSFSISFQHFIIAYCLDFSSAGFRNSQNFSNFC
>orf02105
(SEQ ID NO: 925)
LTEKIQEHELIKTNQAEKSVQDVLDNCIERVQNNSLKSDRVTSFETPFALLFIFATIAVM
LTYGGYRVSAGYISVGTLVSFLIYLFQLLNPISNIANFVTVYSRSKGSSVALENLLAVPK
EKFEGGKSVSGRGLNFNHVYFGYDENRPVLKDITCSIFKGQKIAFVGPSGSGKSTIVRLL
EQFYKPLSGDILMEQSSIYDFNLKEWRSKIAWVSQNNAVLSGSIRDNLCLGLNRLVTDDE
LMKVLDLVSLGDEIRSMKEGLDTEVGERGRFLSGGQSQRLQIARTYLKDAEILIFDESTA
NLDADSEYAIISILYSALKEKTVVIIAHRLSTVKDVDCIFFLEERKITGSGTHKELLENH
ERYARFVQEQMIE
>orf02106
(SEQ ID NO: 926)
MKLKLLRVDTKVIMGSFLLVLSSLLALLLPLILKGLIDGSSIENIGSKVFQSFLIFIGQA
LFSSIGYYLFSQSGEKKIAKIRKKVIEGLIYAEKSFFDKSQSGELTSAIVNDTSVIREFL
ITTFPNIILSLVMVLGSIVVLFSLDWNLSLLLFITLPCMMFIILPLSNISEKYSRRLQEE
I
>orf02115
(SEQ ID NO: 927)
MXXALIPRVSIGSVGLLLLTENYVKGDLKAASRLVQDSLTLLFMFLLPATVGVVMVGEPL
YTVFYGKPDSLALGLFVFAVLQSIILGLYMVLSPMLQAMFRNRKAVLYFIYGSIAKLVLQ
LPTIALFHSYGPLISTTIALIIPNVLMYRDICKVTGVKRKVILKRTILISLLTLVKVSVN
RNHPVAVRIFLPTKWTFVELPLCSSCRCHGGWTLYGYESAYLFIR
>orf02125
(SEQ ID NO: 928)
MRERVRLSGSLFTSLKTREHIKSTMELFHKYVFFLIQEIKIKMINFLKIGDLPTL
>orf02134
(SEQ ID NO: 929)
MANHLYIVPIQVNHKSSIVNRMLTSITRNPIVSPTCLYASLITSLNFFLIFC
>orf02137
(SEQ ID NO: 930)
VIVFLSRNKDGNAFCHLDLISIANPVWGWDDDFITWIDHSHKEGIERIFGSRSDCHLI
>orf02140
(SEQ ID NO: 931)
LSNQFYFSLQTKPILKVKQFLLFQSQMTRVSEILQFSNKL
>orf02141
(SEQ ID NO: 932)
MSKKVLFIVGSVRQGSFNHQMALEAEKTLAGKAEVSYLDYSDLPLFSQDLEVPTHPAVAA
AREAVLVEDAIWIFSHSLQLLYPRYSEKLA
>orf02144
(SEQ ID NO: 933)
MEDKEMGFYLMVASMLLGLLALKIGFSQFKEKKDKFLSILTSLAGTALVLVAVWLGWPK
>orf02166
(SEQ ID NO: 934)
MLDSDIGCSRKNLLGLFWIRRRRNIHIVDRAMEKGISNRAPNKISLKACFFNFF
>orf02193
(SEQ ID NO: 935)
LLHPFTRNITCDRHILTLLGNLVNFIHIDNATLCTFDVKVSNLQEFEEYIFHILTHITSL
RQSCRIRNSKRYIQALSQGLGKESFP
>orf02194
(SEQ ID NO: 936)
VEIDAFVVVINRHCQGTLGTILTNYIVVQDMEEFNWFWHLRQVCQDFLNQFFSNDFLS
>orf02198
(SEQ ID NO: 937)
MEXXXTELAGRGFLVWHPKMDEYMEALDGHLDEISERLITLGGSPFSTLTEFLQNSEIEE
EAGEYRNVEESLERVLAIYRYLITLFQKALDVTDEEGDDVTNDIFVGAKAELEKTVWMLA
AELGQAPGL
>orf02199
(SEQ ID NO: 938)
LITRLLHRVHVLVDDFNPSICITWSSLALIYIFPVLNIIIDRVRQVHIVFLYKSHGLFSV
ILSIGLIFSIGIEIDTIRNSQNG
>orf02200
(SEQ ID NO: 939)
MXXTGSLSANFAGSTTASSSSEQNQSSNKTQTSAEVQTNAAAHWDGDYYVKDDGSKAQSE
WIFDNYYKAWFYINSDGRYSQNEWHGNYYLKSGGYMAQNEWIYDSNYKSWFYLKSDGAYA
HQEWQLIGNKWYYFKKWGYMAKSQWQGSYFLNGQGAMMQNEWLYDPAYSAYFYLKSDGTY
ANQEWQKVGGKWYYLKKWGYMARNEWQGNYYLTGSGAMATDEVIMDGARYIFAASGELKE
KKDLNVGWVHRDGKRYFFNNREEQVGTEHAKKIIDISEHNGRINDWKKGIDEKRVDGVIC
RLGYSGKEDKEWRIH
>orf02202
(SEQ ID NO: 940)
MHKNFVVVVTNFFTAVQFIQFNKEGTTCHNTTKFFNHLDSCLNSSTCRQKVIYNKNTLTW
LNGIRVHSQGIDTVLFFIVSRNNFAWQFTWLTNRRKTNSQLKGNWTTHDKSTSFRSHDHV
DFLVSSILNDFTNSVAISISISHQRTNITEGNAFLWIIFNCCNVIF
>orf02209
(SEQ ID NO: 941)
MNRCNSRQAIWKIISTLNRENTHIMLNRQVCFCFVNHISPLNVVIWENLSLEELLYAICI
CFITHKIAKQTSLTIDNAGIAMNNIR
>orf02214
(SEQ ID NO: 942)
LDSRFFCTDFFKGRQAKGCSFSCTSLSLTDNILAFKGQRNSLFLDRTSFYKTSFFNFC
>orf02225
(SEQ ID NO: 943)
MGRKPRTRPEERTELERLQAENEYLRAENAILKKLRELRLKEEKEKEERQLFKN
>orf02246
(SEQ ID NO: 944)
MLSKEEYIEEIGLIEKQNYVEVELYPLVADIINPTLKNSLSKRYVFGRRKSNMGQIYYGL
SNFPDIVILDKNYQNKARKSIEIEEWKKLRGCVEIKSLKHDLITEEKIKSTISNSFEHIT
GEMGQLIGDLLWYKKVIYTNGIEWRFLSLDDKEEIDNTIVQVVNKRIETEEAGNSFDWWK
NIKDLSFNYTDIYLSKDCIQEWDEFVKKVKEIEW
>orf02248
(SEQ ID NO: 945)
LEVCIHHHHQISCRILQACIKGCFFAKISRERNIMDCRILLPIGL
>orf02255
(SEQ ID NO: 946)
VDRTDEVSSKHCFEVVDRTDEVSNHTHGKATLTWFELDFRRV
>orf02263
(SEQ ID NO: 947)
MTPIKDKVRRVKTPMMVNPDTDLTISSVQQDYFSLALIGFSLLTGDFLSFSKGDQKTGLS
AFIKICHLIKIARLDNKITKQQEYWLYDLLMMSQGEKIQNIKQLKQVTSDILLNTPDFSS
YFEKYNFKEEAENIKSYLLAKSMDKSGRLFPSNEFGEFVSPVSFQHGFGGVLFFMNKYYV
EEDENTVKEWLTKLENYEAANFLHGYSLLFGKAGFLFGILDRYEKTKERYLIDISKRLVD
HLMRVYDNISNLDFALGKSGILLSLMKYCTIFDDKKLANFIKNNINDAYSLLESEDNGDI
YSNNFAHGRSGAAYVLKAYTDIFGDSRYQNHLQKFSDGISELLEEKLSSFSKLDNLGLSW
CDGVSGLILYLCLIDKERYSEIIYKSQLEMVQQYEAMGTSFCHGLSSLLQTTIYNKNQKV
EQFIKKILLTRSYRNNDRLLQFQGEDGINSYFDFGVGNLGIYWTLLGYTFPFELSKGD
>orf02264
(SEQ ID NO: 948)
MHIFLKNRAFRQLTVNEWISSFGDTIFYLAFINYVSSYAFAPLAIFLISLSETIPQVLQL
FTGVIADFQKNRISKYISILFIKVLLYSGVTLLLTSTDFSLFSVFFICSMNLISDTIGFL
AGYMLTPIYIRLINDDMTEAMGFRQSTSSIVRLIGNLSGGVFLGLFSISTLAFVNVLTFL
FAFLGSLLIRNRLKKEEEKIEVPPYVGMSSFFQHLKESMKLLMTMEDVMVLLWILSISQA
VLMMVEPVSAILLIHHPFMGLSTGQSLAILIMISLLHVILGGLLSGFLSKKISIRLNIYW
SLLMESLIVIDFLRGSFLLILLGSAGDAFSAGVLSPRLQAMIFGIIPEELMGSVQSSINV
INLLIPAVLSLALVFLATSAGLEVVAFALIILLLIAAYLVHQMKNLPNQEEV
>orf02266
(SEQ ID NO: 949)
MTVPDRLPARMRMDGRSIFQQIKNYFDTENKEYFKHPNTYDGISMHLEPNILTSMEHFDL
TGFHCECKDFQNQGVCKHWVAMDLYFRSLPQAIQERIGKASHKPSFASQLIPTLPSEELQ
DELVEEKATAPSLALHGQVEIRNHSLAWTLKLQVEQAPRAYVIKDIAHFIFLIFQKEDYF
VSQKIGTIRLSLNQFNQASQNLLLYIKKYFIDRNEHSYFNFSYGINPRDYGRYLETPVSY
LNDLVPLFQALDVFQYVTSKAEYPLIFLDDSPFIPEEEIFKVVKSNNHYEIINTAYFGFI
IQEKLWIRHNHFHIIKEEHRYFLDKLATWIYHYQENSPLIFSKENKAELMQVCNIISNYV
PISIPDELQIHDFIPTFAFSKTRNEIALNMVWSFGEKQVHSKQDLLTLPYTYQASKARKI
YHQLLSAGFKEEFHSLSKIKIVDFFLKELPRFRTLGQVQLDESLEKLLVEDPAVIDIFDD
ESFLSVQFDFSMISEDEVEKAIQALWNQESHYQTKQGKVLVFDDESLKVAQSLQDLRAKF
SDGKIKMHKSRAFSLSETFKDNEHVNFSRDFKKMAYDLTHPEEFDIKPYEVKAKLRSYQK
EGVKWLSMLDHYHFGGILADDMGLGKTLQTITLLEANLKPDQKALILAPASLLYNWKEEF
RKFVPHKQVEVAYGSKTERIKQIEKSATITITSYPSFRSDLEHYQKQSYDYLILDEAQMI
KNSQTKTAQALREFDVKTCYALSGTPIENRLEEIWSIFQIVLPGLLPSKKEFSKLSPQLV
AKLIQPFVLRRKKDEVLTELPELSEHLYSNELSSSQKTLYLAQLRRMQEMVSGASAYEIK
RHKIEILAGLTRLRQICNTPALFLEDYKGDSGKMDSLFELLDTIREKGSRPLIFSQFTSM
LDLIEQELEKKEMSHFKITGQTPSDKRQEMVNLFNQGEKDCFLISLKAGGTGLNLTGADT
VILCDLWWNPAVEMQAIGRSHRLGQTKQVDVYRLITLGTIEEKIQELQESKKELFNTVLE
GQESRSNLSVDDIKEILGVE
>orf02283
(SEQ ID NO: 950)
MMSMVDPIDQTFIVNLKIGKSQVFSQLQFSCHIVVYPSEVHIYQAFVIKLQNHILGPQVL
P
>orf02284
(SEQ ID NO: 951)
LPNRTRIDNQLPTSPVTKQLLVNMSINSNITGRMSHQAVKLLLFASMNQLSPPVLIRQMM
ANSHRQIPKLTMNLKRLIVEHFNFF
>orf02285
(SEQ ID NO: 952)
LIQQVQNPSTPCPWHENISQKPVFIHSYLPSICQNSLQGGGISMNI
>orf02308
(SEQ ID NO: 953)
MIDKVVRNLLLTFLFCKMTKIINFLTTILVKKKKMCYNVSKLREKKKGAMMWVLGFILFI
IFFYSNNSKKIKKLRE
>orf02309
(SEQ ID NO: 954)
VDRTDEVSSKHGFEVVDETDEVSNHTYGKVKLTWFEEIFEEY
>orf02314
(SEQ ID NO: 955)
MIAEFIDGLQKFHFLQNALITAIVVGIVAGAVGCFIILRGMSLMGDAISHAVLPGVALSF
ILGLDFFIGAIVFGLLAAIIITYIKGNSIIKSDTAIGITFSSFLALGIILIGVAKSSTDL
FHILFGNILAVQDTDMFITMGVGAAILLLIWIFFKQLLITSFDELLAKAMGMPVNFYHYL
LMVLLTLVSVTAMQSVGTILIVAMLITPAATAYLYANSLKSMIFLSSTFGATASVLGLFI
GYSFNVAAGSSIVLTAASFFLISFFIAPKQRYLKLKNKHLLK
>orf02336
(SEQ ID NO: 956)
MYEEPEVAPVHPTGPTPATETVDSAPGFEAPQESVTIL
>orf02363
(SEQ ID NO: 957)
MGNNGQFTFGYRHDFFQNQLAIFNALVDTFTRRTIDIKTLNTFINEVLNQGTRTLWTYFS
LLIITCVEGWNDTFVFFQI
>orf02368
(SEQ ID NO: 958)
LHEVVIPSIDEGKDCKGCKPWFHNREGYTPEGTNLTTTVDFS
>orf02369
(SEQ ID NO: 959)
LFHEEDTEWPSNQRQDNCPESIVDSHEVDDTYQWYKDNLFWKRHSSDKDSK
>orf02393
(SEQ ID NO: 960)
MSYFRNRDIDIERISMNRSVQERKCRYSIRKLSVGAVSMIVGAVVFGTSPVLAQEGASEQ
PLANETQLSGESSTLTDTEKSQPSSETELSGNKQEQERKDKQEEKIPRDYYARDLENVET
VIEKEDVETNASNGQRVDLSSELDKLKKLENATVHMEFKPDAKAPAFYNLFSVSSATKKD
EYFTMAVYNNTATLEGRGSDGQQFYGNYNDAPLKVKPGQWNSVTFTVEKPTAELPKGRVR
LYVNGVLSRTSLKSGNFIKDMPDVTHVQIGATKRANNTVWGSNLQIRNLTVYNRALTPEE
VQKRSQLFKRSDLEKKLPEGAVLTEKTDIFESGRNGKPNKDGIKSYRIPALLKTDKGTLI
AGADERRLHSSDWGDIGMVIRRSEDNGKTWGDKVVISNLRDNPEAKDPAAPSPLNIDMVL
VQDPTTKRIFSIYDMFPEGRAVFGMPKTPEKAYEKIGDKTYQILYKQGESGHYTVRENGE
VYNAQNQKTDYRVVVNPTEPGYRDKGNLYKGQELIGNIYFAHSTKNPFRVANTSYLWMSY
SDDDGKTWSAPRDITPGLRKDWMKFLGTGPGTGIVLRNGPHKGRILIPVYTTNNVSHLNG
SQSSRVIYSDDHGKTWHAGEAVNDNRQVDGQKIHSSTMNNERAQNTESTVVQLNNGDVKL
FMRGLTGDLQVATSKDGGVTWEKDIKRYPQVKDVYVQMSAIHTMHEGKEYIILSNAGGPK
RENGMVHLARVEENGELTWLKHNPIQKGEFAYNSLQELGNGEYGILYEHTEKGQNAYTLS
FRKFNWDFLSKDLISPTEAKVKRTREMGKGEMGKGVIGLEFDSEVLVNKAPTLQLANGKT
ATFLTQYDSKTLLFAVDKEDIGQEIIGIAKGSIESMHNLPVNLAGARVPGGVNGSKAAVH
EVPEFTGGVNGTEPAVHEIAEYKGSDSLVTLTTKEDYTYKAPLAQQALPETGNKESDLLA
SLGLTAFFLGLFTLGKKREQ
>orf02395
(SEQ ID NO: 961)
VADRTDEVSSKHRFEVADRTDEVSSKHRFEVADRTDEVSSKHRFEVADRTDEVSSKHRFE
VADRTDEVSNIYTARRS
>orf02399
(SEQ ID NO: 962)
MKIKEQTRKLTAGCSKHCFEVVDETDEVSSKHCFEVADRTDEVSSKHCFEVADRTDEVSN
IYTVRRR
>orf02407
(SEQ ID NO: 963)
MSCNCAFYRSQFFDVNSVSNYHSHQKELRFPNSILFTYFVKVA
>orf02428
(SEQ ID NO: 964)
VGLIKLTSYVFVCISNSFLTRHDKNDNICFFHGNFCLVLDLFHERSIDIINSSCINHAKR
TIEPLTRCINTVTCHSFDIFYNGDSLTSDPIK
>orf02430
(SEQ ID NO: 965)
LSSKSCIDRTNQETFHTLGLEGVGMKSGSLFCSVQISDKEKENSRLANGFLRYQFIQGIF
LLLTSYHNHRVGLEILPR
>orf02448
(SEQ ID NO: 966)
MKSKEQTRKLAVGCSKYSFEVADKTDEVSSKHCFEVVDRTDEVSNYIYGKAKLTWFEEIF
EEY
>orf02450
(SEQ ID NO: 967)
LSNSFFLIKFSSSKTSGKKRIVSDNIFIRNKFICHFKKE
>orf02459
(SEQ ID NO: 968)
MDYSKVAAEVIEAVGKDNLVAAAHCATRLRLVLKDEAKVNQAALDNNADVKGTFSTNGQY
QIIIGPGDVNFVYAEIIKKTGLKEVSTDDLKEIANKDKKFNPLMDLIKLLSDIFVPIIPA
LVAGGLLMALRNFLTSPDLFGPQSIEDMYPAIKGFSAMIQLMSAAPFMFLPVLVGISAAK
RFGANQFLGAAIGMIMTTPDLGGKEAFWDILGFHVTQTNYAYQVIPVLVAVWLLANLEKF
FHKKLPSAVDFTFTPLLSVMITGFLTFTVIGPVMLVVSDAITNAIVWLYNTTGAFGMGLF
GGTYSLIVMTGLHQSFPAIETQLLSAYNNNGTGFGDYIFVVASMANVAQGAATLAVYFLT
KNAKTKGLSSSAAVSAFLGITEPALFGVNLKYKFPFFCALAGSAIGAFVAGLTHVIAVSL
GAAGFIGFLSIKAGSIPMYIIAEIMSFVAAFAFTYFYGKTKAASVFADEAATATAETVTE
PTVEAPVVEETDTLQNETLVTPIVGDVVALADVNDPVFSSGAMGQGIAVKPSQGVVYAPA
DAEVSIAFPTGHAFGLKTRNGAEVLIHVGIDTVSMNGEGFEAKVAQGDKVKAGDVLGTFD
SNKIAAAGLDDTTMVIVTNTADYASVAPVATGSVAKGDAVIEVKI
>orf02466
(SEQ ID NO: 969)
MTESYTWVEADRATLSRYRHGQGHLTDQFFSFKVQRPAAKTLIASISTGKGMGPSFDGTP
VITSGNQNRINTIKNSFIMSSSSVRISLRKLTSQRNFLRNLSSLILLAAQVAKGDATACS
HQRISRVVGQDSHETLSLTEFF
>orf02467
(SEQ ID NO: 970)
MNINNEKVWFAFYLLDMQITRPTPTFNDRRIGLIGKLQELRFLAGNLLLR
>orf02468
(SEQ ID NO: 971)
LIKGYLPNHLALMDLCSKTTCTLDDFAGIAGRRNHRGFFCHIGNGVFLTVDKYLRNQRIR
QRKSSHHILTQLVCHSHTHLFILLQTSLSLRTKERLSF
>orf02474
(SEQ ID NO: 972)
LINLTGRNFSDILIKCLVKCFTNLLSNQLMLLPSTLKL
>orf02479
(SEQ ID NO: 973)
MIESENHCSASHSNRDYQSQHDNQGRTCQCFIIVPCHKKGSCSVGEITWNQRCQNGQDKD
HSRCLIKNT
>orf02486
(SEQ ID NO: 974)
MIARQLMVFFSTNQADTRITNMSIDSLIINNSKDFQSSSHASVSFILTNLVNLLIFNF
>orf02487
(SEQ ID NO: 975)
MGEPFTHFIDCIDLGINPSYTQVCDRHFTSDIPCTMTSHPIS
>orf02494
(SEQ ID NO: 976)
LSSDSHFIGIKAFVILILGKSNSIVLRIVGLYQDLTCFFSPTCSTCHLSQELEGSLRRTE
IRQIQGRIRI
>orf02495
(SEQ ID NO: 977)
MAVHSLGIHMQGQRNIAVGTSIHRPTLPTHDKARITTAIEHENHLLFFNQTVLDSL
>orf02496
(SEQ ID NO: 978)
MVTGIAVLLISHFMLFINNHDTQIFQRSKDSRSGTNNNLGIATLHLAPFIILFTIG
>orf02497
(SEQ ID NO: 979)
VKNGYLVPKTCYKTLGHLRSQGNLRYQQNSCLALIQGTLDNLQVNLGLPTSCNPLK
>orf02498
(SEQ ID NO: 980)
MVNLIPRLGLDLLLIDCLIFQTKQAFSSQTHHFSLLGKV
>orf02499
(SEQ ID NO: 981)
LGLQTKNNPLNQAIPLTKRHMNPHPNFQHSLKFLRNPVTIGLVRLHQGHIYDNLS
>orf02502
(SEQ ID NO: 982)
LGNHFCTICSTTYQAILQFIQIWWCQEDKDSIWNLFLDLKSTLNFNFKENIDSLVQGFID
IGQRSSIVVADIFCVFQHLSLTNQLFKFFTSTEEIVNTVHFSRTLCACRHRYRILKLVFR
TLKNLSSNRSFSNP
>orf02527
(SEQ ID NO: 983)
VGCSYICHELVTNHDHFLFVIVEFLHSTVNTKCEGLQGPVNVINPKFLNCSLNAFFGVI
>orf02528
(SEQ ID NO: 984)
LLHLWRSIRVVPSNGGIIQIDQNSLDSLRLQAWDCQIIDCFHSKIWYIIFNRHSGSFC
>orf02530
(SEQ ID NO: 985)
MIGTFAAALVAVLASFIVPIEITLNSANTEIAPPDGIGQVLSNLLLKLVDSPVNALLTAN
YIGILSWAVIFGIAMREASKNSKELLKTIADVTSKIVEWIINLIPFGILGLVFKTISDKG
VGSLANYGILLVLLVTIMLFVAPMVNPLIAFFFMRRNPYPLVWNCLRVSGVTAFFTRSSA
ANIPVNMKLCHDLGLNPDTYSVSIPLGSTINMAGVAITINLLTLVTVNTLGIPVDFATAF
VLSVVAAISACGASGIAGGSLLLIPVACSLFGISNDIAIQIVGVGFVIGVIQDSCETALN
SSTDVLFTAVAEYAATRKK
>orf02537
(SEQ ID NO: 986)
MWNKNRQLRKVKKILNQINRRKEEMALLTDEELAAKTQEFKRRLTAGETLDDILVEAFAV
VREADKRILGMFPYDVQVMGGIVIHQGNVAEMNTGEGKTLTATLPIYLNALSGQGVILVT
TNSYLAKRDAEEMGKVYEFLGLTIRLPFADDEEEKITPKEKKEIYSADIVYTTNSGLGFD
YLIDNLASSEEQKYMPEFNFVLVDEIDSVLLDSAQTPLVISGSPRVQSNFYGIIDTLMIT
LVDGEDYIFKEEKKEVWLTNKGAKIAEKFLGIDNLYAEENNVLARHLVFALRAHTLFKRD
KDYIIRKGEKDQELVLLDQGTGRLMEMTKLQGGLHQAIEAKEHVKLSPETRAMASITYQS
LFKMFNKISGMTGTGKVAEKEFIETYNMSVVRIPTNRPRQRIDYPDNLYITLPEKVYASL
EYIKQYHAKGNPLLVFVGSVEMSQLYSSLLFREGIAHNVLNANNAAREAQIISESGQMGA
VTVATSMAGRGTDIKLGKGVAELGGLIVIGTERMESQRIDLQIRGRSGRQGDPGMSKFFV
SLEDDVIKKFGPSWVHKKYKDYQVQDMTQPEVLKGRKYRKLVEKAQHASDSAGRSARRQT
LEYAESMNIQRDIVYKERNRLIDGSRDLEDVVVDIIERYTEEVAADHYASRELLFHFIVT
NISFHVKEVPDYIDVTDKTAVRSFMKQVIDKELSEKKELLNQHDLYEQFLRLSLLKAIDD
NWVEQVDYLQQLSMAIGGQSASQKNPIVEYYQEAYAGFEAMKEQIHADMVRNLLMGLVEV
TPKGEIVTHFP
>orf02538
(SEQ ID NO: 987)
VSNKLHILQIGNRNWSHYYEIPENIEWHFFWPGSTTAIKKVMKMEGIRTFSGVVIENPDY
LPDLLPLINILTPYTIFYSDICASYSPLVEEFLKKTCAQVTDFSNPRELLRILSKALFKG
QYGDKLTPIDMVVNPYFAGSIRYNGYENLELVGSYGEDFRPLISWKYNIRASEWNPIELW
LEYEKDLSCDIRIVVRNIQDGSTADFIKERIFTTDDMEAAILLDDDFSSFISVSLEAKGN
GRLKIGALHQRLTRYQFGKFVLGGNIIRSKNREEINYFFYPGDFKPPLNVYFSGYRRAEG
FEGFGMMKSLGSPFLLFQDPRIDGGAFYLGDDDFENAVRRVIQHHLDLLGFSNKELILSG
ISMGTYGALYYSSDFEPKAVIVSKPLTNLGLIAERGRLEAPGLFPTAFDILRHHSQGKAD
IDSINILNARFWERFRGADFNQTIFGLSYMKEEDYDPIAYDSLVDSLYSTGARIMVKGTS
GRHNDDNDSTILWFVNFYKMVLEQEFGRKY
>orf02539
(SEQ ID NO: 988)
MYYFIPFLESMNQSWQVDIVPWYQTTHRLEFDDVLHQIRIFKREGIKSKIVLLPYHPHMR
YLLHRQDLLEVEAFSVFDAIQDIENEEIYPLQLKDLAWDEDCDFIYTPFLIAVKQKGELH
AHIEFGTEGFISYITYFKDNQVDFICYFDDRGFLSSLVKYQDNQAVSRYYYNSNAEWQIK
EYLQGIHTKVEVNPRFSHRFRKSTYQSMDEVVWEFFEKFLTAEYKEGESFVLAAQTKYQN
QLLKHLPEHADKILTFFIERNQEDDLNLHHQAVKQAKILISDRQDFLERLHQHYPQFTYK
MHHLPSFDTRLKLGVSQRVKESKLYVQLDLNTPLNSEALYEVLNFVSQNPLTEIVFATFN
AEGYQIEALQKHLFTLISERLNFRDLLKESIISGAENKLEENKEENYRFQIVNLNDEIGL
IRELEYTRLIVDLNPIANIYTQIAGISAGIPQINLSESEYVTHLQNGYILSDLSEFSKAG
HYFLDTLEHWNQALIHSIDKIRQNTGNQFVQKWERWLEEAKSEQ
>orf02540
(SEQ ID NO: 989)
LKKKLKSVVVKRVMWTICFIFVYILGSRLTLPFVNVNDTSFLGGNAAFLAFSTAMTGGNL
RSLSLFSVGLSPWMSAMILWQMFSMSKKLGLGNLPLEIQERRKMILTFIISFIQTLAITL
NLPIQEGVNHDLVLILNILLLISGTFFLVWLSDLNSLLGVGGSVVILMSSMIVSVPENIV
RSIIDLHVNLLFIISLLLISIAFLYIAVRVQKARYRILVNKIMIHNRFKRYSYFDIMLNP
AGGMPFMYAISLVSIPQYLLMLLHIFVPKTRWVDNWIAEFTIGRPVWVYTYIIVLFLLGI
AFAFVNMNGEQIADKMKKSGEYIYDIYPGEDTALYINRLVLRFAVIGSIYILLMAGIPML
IILYEPRYMQLSMLPGLFLMFNGMIFNVKEEINALTLNESYRPLVERK
>orf02541
(SEQ ID NO: 990)
MKINITNIYGMSGQSTALIAQNETVKIAKKLDFHELSFYFYNIYSDSEGELNSRLDGVLA
KLGYGDIVVYQSPTWNGREYDQAFIRKCKILNTRIITFIHDVPPLMFPSNYYLMSEYIEM
YNQSDLVVVPSEKMKERLIQEGLTVQKIIIQGMWDHVHNYPLKQPSFQKKLSFAGSVERF
GHLSNWSYSTPLDIFSESNYENSNPRVSFKGWKTDPELLFALSEGGFGLVWGTNENPADE
EDYYRLNISHKVSTYLAAGIPVVVPSYLSNASFIKEKGLGYVVDSLEEANRLVEETTVEV
YQQMVENVSKVSYALKEGYFTKKLLTDAIMQLLDI
>orf02543
(SEQ ID NO: 991)
MKAIVLAGDKNYLTPILTTIKSILYYNQNVKIYILHQDIPSDWLQELKIQVEKLGSVVEG
IYIGDAIDSEWKTQAHISPIAYARYLISRLITEDRVVYLDSDIIVNGDLSPLFELSLGDY
SLAAVRDVDGNGFNSGMLVIDCQKWREKDVTSMLFDKTVEYMSYLDHTDTDGFNGDQTIF
NLVFQNHWLELDKRFNFQVGHDIIAFYSHWDSHFELDEEPLIIHYTTYRKPWTTLMGYCY
RDLWWSFHDVTFDQISDHYQGRFAVKRVYDFHDINLFTFTDSQDLLYIDELAQSLLDIAF
HIGAYTDMGDILLALDKYPNVYLYPSMVGAVIDEMIEKSDAYLDIHKGSSMDFIVNRYTS
AGRPVLTFDVTNKNQLEEIVVPSQSPLEMIKVIKKLKSDKMETKAIVFGANYQYADKVLT
TIKSICCHNRGLRFYLINSDFPTEWFYNLNRKLTKLDCEIVNARVNSSHISQYKTNIHYA
VFLRYFISDFVEEAKVLYLDCDLVVTRDLSPLFDLELGDYPLAAVKDLGGQIYFGEHIFN
SGVMLINNRLWKQEEVRKQLIEMTNELHDKVAQSDQSILNLLFKDRWLALDFKYNCITLH
THFSDYRPESGTYPPIIHYLTERKPWGLYECSIYRDVWWYYNAQDWSDMSQVTPSLTKDQ
VSQYTGVQYSALVYTFSSDLRNMGYLIENLPDVKFYVAAPVMVADSITDLLAYPNVSVLS
DIAGQPPLIDSLVEGCDFLLDINADIEVDGIIERFRQAGKPVFAFESVVHGEQGQFLYDQ
AHPEEMVLAIEAYCQNGELPVKKFQSYPKVLDIQQSLDYILEHHTSVIRYGDGEMDIMMG
HGIPYQDYDETLAEQLRSMIQLESSPELLVCLSDVFEGLERYNSESVNFWKKHLEHYKDA
YQQYCTASFYGSTFISRPYMDLKDKTASVAHFEKLKQLWDERDILIVEGENSRSGVGNDL
FDNAQSVERIICPSRNAYSKVQVIQEAVEKYADGKLVFLMLGPTAKVLAYHLSQKGIQAI
DLGHVDSEYEWFKMGATSKVKFSHKHTAEHNFDQEIQFVEDEIYNKQVVVRI
>orf02545
(SEQ ID NO: 992)
MTDKASKKAIVLGADSNYMDKVETTIKSVCSHNRDIRFYIFNSDFPTEWFQLMNKRLSVL
NSEIINIKITDDTISHFHLPTPHLSSATYLRYFIPNFVFEKKVLYLDSDIVVTSSLTALF
DIDLDGYPLGVVPDIPTTDEEFNSGVLLIDTNRWREEDIYRQLFELTIAHHEHVYGDQGI
FNILFKDRWKRLDITYNLQVGVDAHRYYMGDYDWYELFEGVPCIIHYTTENKPWKHFRFN
RFRDVWWFYYGLNWNDILLRTHVLKETFLELISPISKHVSIFTNTGDIESIGYLLEKLPD
VQFHIVAPTYFSPNVIELQRYSNCYIYPCADPKMKQDIIDKTDICLDINYGPAMDQMLQE
MVRRGKTIYSFDCTNHFFNGESTVFTVDEIDELIRSVKELKM
>orf02546
(SEQ ID NO: 993)
LKDLVSVVIPVYNVENYLEECIQSVLNQTYTNLDIVLVNDGSTDASAEICARFAEIDGRV
RVFHTENRGAALSKNFGVTQALGEYVLFVDSDDIAEKRMVETLYRQVEETGADIVIGNYF
LYDENDGQYKLYVLERDFCIEELSAQELIDRQAGKWHLNASAFIMPVFKLFKKDLLLQVP
LLMVGALMMKQRFIDCS
>orf02550
(SEQ ID NO: 994)
MRGGVDTTQVMTETVEDKVSHSITGLDILKGIAAVGAVISGTVATQTKVFTNESAVLEKT
VEKTDALATNGTVVLGTISTSNSASSTSLSASESASTSASESASTSASTSASTSASESAS
TSASTSISASSTVVGSQTAAATEATAKKVEEDRKKPASDYVASVTNVNLQSYAKRRKRSV
DSIEQLLASIKNAAVFSGNTIVNGAPAINASLNIAKSETKVYTGTGKDSFYNIPIYYQLT
VINDGSKLTFTYTVTYVNPKTKTLGNISKKMSNGYSIYNTGTSIQTMLTLGSGLGKPSGV
KNSITDKNGKQVRPYNTSTMTMWRSGYTWANGAQMNGFFAKKGYGLTSSWTVPITGTDTS
FTFTPYAAKTDRIGTNYFNGTRKVVESSTTSQSLSQSKSLSVSASQSASASASTSASASA
STSTSASTLASTSASTSASTSASTSASTSASTSASTSASTSASTSASTSASTSASTSAST
SASTSASTSASTSASTSASTSASTSASTSASTSASTSASTSASTSASTSASTSASTSAST
SASTSASTSASTSASTSASTSASTSASTSASTSASTSASTSASTSASTSASTSASTSAST
SASTSASTSASTSASTSASTSASTSASTSASTSASTSASTSASTSASTSASTSASTSAST
SASTSASTSASTSASTSASTSASTSASTSASTSTSTSASTSASTSASTSASTSASTSAST
SASTSASTSASTSASTSASTSASTSASTSASTSASTSTSTSASTSASTSASTSASTSAST
SASTSASTSASTSASTSASTSASTSASTSASTSASTSASTSASTSASTSASTSASTSAST
SASTSASTSASTSASTSASTSASTSASTSASTSASASASTSASTSASASASTSASTSASA
SASTSASTSASTSASTSASTSASTSASTSASASASTSASTSASTSASTSASTSASTSAST
SASTSASTSASTSASTSASTSASTSASTSASTSASTSASTSASTSASASTSASASASTSA
SASESASTSASASASTSASVSTSESTSTSGSTNSRPQETITNSRQELPNTGEKQSVKSGL
LGLILGLTGLGLVAKRRKRDDED
>orf02551
(SEQ ID NO: 995)
LKAFVEAHPDAFLREIAARFDCALPSVWAVLKQIKVILKKTTSFKEQKPEKVSEFLDILD
NLKDLPVLYIDETGINRYLYRPYAGAPRGEKVYDKISGRRFERTNEVEQKLNGSFLIRYI
DSQIRE
>orf02552
(SEQ ID NO: 996)
MAYSTDFKQGALDSIKEGHRHVEAAKVFDVGVRTLFTWEKKDVNKGT
>orf02559
(SEQ ID NO: 997)
MKIKEQTRKLAAGCSKQCFEVVDETDEVSLKHCFEVADRTDEVSNHTYDKVKLTWFEEIF
EEYHTKKPCSSR
>orf02561
(SEQ ID NO: 998)
MKKSDVLDLIKYHYEGRETEFRNQSIAIARNFNKHGDTQIAQYIMGLMSQSDRFMPQIEN
PSEYLTPAKLDIGPLPLPLSIMNDLKGIINAVNHHIGINKFLFVGSPGTGKTESVKQVAR
LIGKELLVVDFSHLVDSKLGQTVKNLATLFNEINNLPFKQNYIILFDEIDSIVLDRVNQN
DLREMGRVTSAFLKELDRLSPEIVLIATTNLFENLDKAVTRRFDAIIDFDRYTDEDKVEV
ATIILNELLKQFKNVARDLKLFKKIINSANVIPNPGDLRNSIRTSLAFSDPSDPHDYQKR
LLRSLHNGRNLSISKLSKLGFTVREIEILTGISKSSVSRELSED
>orf02597
(SEQ ID NO: 999)
MRFIVGIFISFSPEIEFLSSLKFLTDFVEICLLWQVMTP
>orf02598
(SEQ ID NO: 1000)
VVEIIYFLIIIIASGLGSISGMGGGIIIKPLMDSFGYHSVSDIAFYSSFSVFIMAIISTT
KRFSQSKEIKWRLIFTVSFSSVLGGFLGHLIFQVLLSQLSVRLVSIVQMILLFVMLLVSF
VLTDFKKTYQFDKIGFYMICGLLLGLISSFLGIGGGPLNVSLLMVFFSISIKEATMYSLA
IIFFSQLSHLATIVVVTGLNQYHLAPVPVIFLASICGGVLGTVVSKVLPENWVRYCFKGM
LFFVMGMTLYNLFHIL
>orf02599
(SEQ ID NO: 1001)
MMGTNSEEGFLDDFEGPQVAVSVKDFSIADTPVTNQEFAQFVKETGYKTLAERQEWSFVF
ILFVPEAEREGYPHPAGAPWWLQVSNACWKHPYGENSNLVGLEDHPVVYVALEDALAFCN
WSGMSLPTEAQWEYAARGGRQSEYPWGDTLLEGGYYHANTWQGRFPYENTALDGFIGTAP
VYEFLPNDFGLYQMIGNVWEWCRNPRYTLLASFNEDDYELPKYGIQDEEYAIRGGSFLCH
CSYCNRYRVAARNGCISTSTSSHLGFRCLKE
>orf02602
(SEQ ID NO: 1002)
MVQTKQPNIILIVVDQMRADALSLNSKDKLVSTPTLDMMASVGYNFENAYSPVPSCVPAR
AALLTGLDQDKSGRVGYQDEVPWNFTNTLPKVFKDMGYQTECIGKMHVFPSRQRLGFDHV
LLHDGYLHVDRKYDKAYGSQFDYASDYLAFLKGKVGYDVDLIDDGMDCNSWEARPWDKDE
KLHPTNWVVSESISFLQRRDPTVPFFLKMSFEKPHAPLNPPKYYFDIYMERLPQFLDLHI
GNWEVLEKQIPSIYALRGKLKEDDQRRMVAAYFGLITHIDHQISRFLTALKEFRHDKDTI
IWFVSDHGDQLGEHYLFRKGYPYQGSIHIPSFIYDPAGLIAGNRGTIKQLVKIQDIFPSL
VDLAGGTTTDELDGRSVKNLLFGQYEGWRTEFHGEHALGKDSSQYILTDQWKFIWFPVLN
HYQLFDMKKDPHEMNDLYPSEKYQPIVRQMKKKLVDFLRYREEGFVVDEELVPVELSKIT
PTLTKTGDSQS
>orf02604
(SEQ ID NO: 1003)
MNTMLDKMQEKLSPIAMKVENQKFLVALRDSFVGTMPVIMTGSIALLLNAFLVDLPQQFH
LESITKTFQWLVDINNLVFKGSIPIVSLLFIYCLGVNIAKIYKVDTVSAGLVSLASFVIS
IGSTVTKSFPLANVGDVKLDQILQGIDNLAFDGKNLMVTIGNVIPGNHINARGYFTAMMI
GFLASIIFCKVMKKNWVIKLPDSVPPAIAKPFTSIIPGFMAMYIVAILTYVFHLLSNDLL
IDWVYKVLQTPLLGLSQSFFAVILMIFLNKLFWFFGLHGGNVLAPIMEGLFGVAMLANLD
AFQKGEPIPYIWTSGSFGAFVWFGGLGLVLAILIFSRNSHYRKVAKLGLAPVLFNIGEPV
NYGLPVVLNPLLFIPFVLSPVFMATVAYWATSWGLVSPVTQNVTWVMPPILYGFFSTAFD
WRAIILSVVCLIISVLTYFPFVKMADKTELS
>orf02605
(SEQ ID NO: 1004)
MNESNLESVMGLIMYGGEAKSNAMEAIQAAKKGDFSKANRRLADANAALLQAHKAQTEML
TREAQGEKTSISLLMVHAQDHLMTSLTFVDLAKEVVEVYERFEKN
>orf02606
(SEQ ID NO: 1005)
MAKVTIMLACAAGMSTSLLVTKMQKAAEDKGLDAEIFAVPAPEAEEIVATKEVNVLLLGP
QVRYLLGDFQEKLKDRQIPVAVIPMTDYGMMNGSKVLDLAESLLD
>orf02607
(SEQ ID NO: 1006)
MKRLISANPSEILQMNAEELKQSILASEGRVVLSENVVTRETFVGDITNSEIARAFGADM
ILLNCVDVFEPKIYALDSSGDDVIHRLHQLVACPIGVNLEPIDPSAKMLEETQEIVAGRV
ASVETLNRIEELGFDFVCLTGNPGTGVSNREIIKAVQTAKENFSGLIIAGKMHGAGVNEP
VAELSVAEQLLEAGADVILVPAVGTVPAFHDQELREVVDLVHSKGGLVLSAIGTSQETSD
TDTIKEIALRNKICGVDIQHIGDAGYGGLATVDNIYALSKAIRGVRHTVSRLARSVNR
>orf02608
(SEQ ID NO: 1007)
MEKLLQEKLLPVAARLGNNKALVSIRDGITLTIPLLLIGSLLMVIASFPIPGWEKYLGDI
GVADYLWKGVDSSFGLLGLVASFGIAYFMARQYKVDGIPAGIVSLSSFITVTPFIRGEAG
AGMPTAFMASKGLFVAMILGLINGYIYQWFINHNIQIKMPDGVPPAVSKSFSAIIPGAVT
IVGWLIVYATLDKLSLPNLHEIAQVALGGPLGLLGNNVIGLLILIFLNSSFWFVGLHGGN
VVNAVMKPLWLANLDANKVAYQTGETLPNIFTSVFMDNFVFIGGGGATIGLVLALGYLAH
KKKASKQLKTLAPITVIPGLFNINEPAMFGVPIVLNILLLVPFILAPMFNLLVAWGAMAS
GLVPLTYTDPGWTMPPVISGLLATGSISGSLLQIVLIVLDVLLYLPFVIAIEKRFKLLED
>orf02609
(SEQ ID NO: 1008)
MTLSKKQLQLRAKILETVYTLGPISRIEIATKTGITPATTSSITNDLIKENILLELGEDE
HDTSVGRKKILLDIQAKRFYYIGCELSEKHFTFALGDNLGNILKEEKEIVTKQLIQEKGN
QLINQTLKQFLNNCSDYEIEAIGIALPGRYLDDYKITTNNPLWQHIDLEMIQSHFDKPLF
FSNNVNCMAIGKRLFSRQQNDPNFAYFHFARGMHCSYIYDGNIYGKGNLMIGEIGHTVVS
SEGEECSCGRKGCLQTFAGESWLIKKSKILYHQSPYSLLPSLVKNADDIDIQVILTAYQL
GDTGIITLIHQALLYLSQTILNISMMIDSQKIYLHSPLLTNQHIIQKLYSEMNYKPKLLY
NRLPEVIIEPYNDFTAAHSAIALCLYHTILHS
>orf02628
(SEQ ID NO: 1009)
MPFKENLICQHRNHHCSVFFISLGLLHNIHIEIDISQTRASFLDLSDYLQAVLMILQKFC
QAIGLAQRLDLLQLHLLHLTRLLL
>orf02636
(SEQ ID NO: 1010)
MYLLLLVVKDHIALIDKEMHVWRPNCILRDLTNFFIKRNHIVTHKTNGSTTKR
>orf02637
(SEQ ID NO: 1011)
VLTLMNHFIKEIQGISINHLTILIKNSIFKLNLKNRIIG
>orf02641
(SEQ ID NO: 1012)
MKIKEQTRKLAAGCSKPCFEVVDRTDEVSSKYCFEVVDRTDEVSSKHCFEVADRTDEVSN
HTYGKATLTRFEEIFEEYKGVPR
>orf02655
(SEQ ID NO: 1013)
VCQRMDARTCKTTIIAVHNVLTALQQTWIAVQLYQTK
>orf02656
(SEQ ID NO: 1014)
LHLGKSILSLPVKGKDLEFLVHLFVINHWIGSPSRTSTFCRCKVLNGME
>orf02657
(SEQ ID NO: 1015)
LEQTVIIANNPCELYWDNHLSFLSDSLLKQVIVHLKRICLDIHHDRGCSHVRNDTT
>orf02673
(SEQ ID NO: 1016)
MLEEGTKDQLAELTYPFGRGVNLSFGIKDVPKLYQKVMEANYPIYRLLTKRKFRVSDPYI
YPHKFAVLDPDGYFLRFSE
>orf02689
(SEQ ID NO: 1017)
MIACRHDICKSQKGLEHPFCIIRRLTRDFNQRPVCIVEANIFCLKITPQIITNMIVARTV
KSSKTGITLTTSMCKRDNHKITWFHRRNGFPSFFNNPNRFVSTIFMSSFRFWITVPP
>orf02705
(SEQ ID NO: 1018)
MNMNKDQIAILNGADNLNLTLWITLKEICKEGCKSFFPVRNTCRMLDIGIPYRLGLSLSN
SSVLNGMDV
>orf02725
(SEQ ID NO: 1019)
MHKLRIFVNQLCRRFGIILGPFLVLGFQVLTQELELAIFFDLREEVLLQVIPQVCHFCYL
RKEFTTLNQHELTSHDHVLTRHFQTHGLQG
>orf02732
(SEQ ID NO: 1020)
MQVTIEADSGLFLLSPVVQLLKVEIDVKQVTMSLDNLGRTKLSHQTFWVAGVEVHVPFNN
ADALPKWRIRT
>orf02734
(SEQ ID NO: 1021)
MKNGIDFAHIAITDFFHNQAIAMGIAHYNDGLLCHDGNTSKSFLTAKAR
>orf02758
(SEQ ID NO: 1022)
MSIVKSHSFSISLGIFNSFWNNIHTSECFYFLCKGKSNRSNSTISVNQMVFFINIQRFYC
FAIEDFCLLRI
>orf02759
(SEQ ID NO: 1023)
LNTLLPPDNLCLFTIYLTGFSCICINSYCHNFWEIFNQLFYQLS
>orf02778
(SEQ ID NO: 1024)
MYNKVIMIGRLTSTPELHKTNNDKSVARATIAVNRRYKDQNGEREADFVNMVLWGRLAET
LASYATKGSLISVDGELRTRRFEKNGQMNYVTEVLVTGFQLLESRAQRAMRENNAGLKGQ
IWXXIHSLIN
>orf02782
(SEQ ID NO: 1025)
MQFTRTTHHPKTLFTTKFAWENEIPFWHHGTRKSHNGFQPNTRIRCSCNDLHYLVTCDCN
LADVEVVTVWMSYHLDNFTNNKLRFLIINNFFCKTFRL
>orf02784
(SEQ ID NO: 1026)
LTALCNFKQARNLKNVPSYCFPIFFEENTGYLAFAFHIQFGISAIFHDDHKDITDMFFVI
RKNHCFLFLLFQSC
>orf02788
(SEQ ID NO: 1027)
MKIKDQTRKLAAGCSKHCFEVVDRTDEVSSKHCFEVVDEADVV
>orf02789
(SEQ ID NO: 1028)
MYYSVDDVVSNAFKKRMILDSFFAFNCSGTMKVSTWVYDKGEWYYVSSSGSMIANDWVKD
NGK
>orf02793
(SEQ ID NO: 1029)
LTWILTKIARKDSLQLFELEANLISFLLVMSVDLAPFCFKEENF
>orf02803
(SEQ ID NO: 1030)
MEDIDEDELLIFEKVLGQLQANIKGIGGENKEISQKN
>orf02804
(SEQ ID NO: 1031)
LHLRTCFVRQTNKLSPLINRTRLQFHQTILHYTLNQITSNRLGNIEFLLDIFNQDQVLVF
LAIIQKTHNLTLRPTHKFNAATFGFLLHHQVNLMTKTLKD
>orf02821
(SEQ ID NO: 1032)
MLEIWKYRPFVSEFWNDFKNNHDKQFVDPISLYLTLKDDDDPRIEEESEALENMILQYLG
EDDAS
>orf02823
(SEQ ID NO: 1033)
MQDLLFHFYSYRLNLTFFFFELLICLLNSEFDLSKFIFVYFDEYFHEDSLKMNLHQFSFS
F
>orf02829
(SEQ ID NO: 1034)
MAFNQFNRCIGLSIPTAPNVPGTIINRSYLHDATVPNNVREKT
>orf02845
(SEQ ID NO: 1035)
LTDFHDFKFIFFENLFKSRQLYLQSQNSVLSNLWLAT
>orf02850
(SEQ ID NO: 1036)
MKKLFILISNLLASLFFVWVFTIWTDTYVSHYYPNVVVHDSSPETTFQHVATRLEKLAEE
TDSFIAIQHQDPNSEGTTVFSYTTFGDGKLPDGLQEKNLEDAQSSSVETNYFVFDGHLDI
HLLREELSQLGLTNMHLTIPSKLSTLMAIFSNGFQLISLLIFILTFVALTLISQISQLRS
SGIRLISGEKRWSIFLRPVGEDLKAIAVGFSLAGVLAILMQKILSLPTQSLMTIGAGLLS
YNLILLSISLFFAQLFAVGIKKIHLMQIIKGQVPVRGIISLILIGQLLAIIIVTLGIGSS
LKYSQAWQQHRIGQEIWSQERQLITLSISREGTSPGFDEQAQRKLRTWYQLMDLAVSEQK
AFLSRHQLIDRTLQNGMASSKNLITSTEWHDYNPNGNVLIVTPQYLERQNIPVDTTIEQK
MNHLNVGEFVLLLPEHLRSEEEHYKSVFEDDLTSRMSSQDERQQMTATVGYLESGQDRFV
YNTTPISYQQFLKDPIIIVITPQSTGPQSILFWIDAVQNYVLFNQLSDAQELIQRQGIEN
WVSEMQTGYHNYITLLDNIQRERWVMLAGAVLGIATSILLFNTMNRLYFEEFRRAIFIKR
IAGLRFLEIHRTYLFAQLGVFLLGFVASVFLQVEIGVAFLVLLLFTGLSLLQLHVQMQKE
NKMSMLVLKGG
>orf02859
(SEQ ID NO: 1037)
VLKWCILRINHHISRKVDNFLEGTRAHIKGQAHTAWNPLEVPDVRYRSFQFDMSHTLTTN
FRTRYFNPTAVTNNSSVTNAFVLTTSTFPVFCRTKDHFIKESFTFWFQGTIINCFRFFDF
SIRP
>orf02869
(SEQ ID NO: 1038)
MPWKELCHKLAPKVFKVIRIYSRENKKSPSNWAFCSFET
>orf02877
(SEQ ID NO: 1039)
VDSLFLSLGEESNQEINLQESFSSTDCNPTLISPETTVAQGLCQDIIYRPFT
>orf02880
(SEQ ID NO: 1040)
VNPKSLGSFFLQDSKGFKELVLGHAKLSLPRIVHNVCPQFKNASRIITTRDDFWNACYSL
QMFNIFKGIQVNGRTQFTCIGVFLVWRVVGREHNLRTQKVQFMAHQKLYITRAVHTTTFF
LENFQNSWSWSSLNCKIFLKALVPRKSLVDGSCLLTNPLLIIQVKGSRELGNNRF
>orf02884
(SEQ ID NO: 1041)
MDNLCFHNAWTDWASILKQAVVTEDDMTKQNDFFLGIIDAEFHNCLGNFAINESDMSKKI
TSHCVLCLVWPRQLDDLS
>orf02885
(SEQ ID NO: 1042)
MQHNPRIEQALIELRINFANSVCQTHHGRRMIGQARFKGMVVGLGSWIGVEFLIILGVEI
SDNPLPDRIFNFENHLRHVVTNFLDINW
>orf02886
(SEQ ID NO: 1043)
LIDLRGIVINFSASFHVDNLTCGKGLNVMRLGIPELPINLATIILEGKG
>orf02899
(SEQ ID NO: 1044)
MDALVLQKNQETIQQIAVKIRFLDGHDYYSLIDIDNRRTNQTVFPFVNF
>orf02900
(SEQ ID NO: 1045)
MAFFTEIPTRACLINLAITLHIVETCQGFNDLSLHLRVLAL
>orf02904
(SEQ ID NO: 1046)
MLLPLPFNTSKIKQIAMHSDLNQKEMIGHIFHDEDIF
>orf02909
(SEQ ID NO: 1047)
MKQTVKKLALVASIAATLGGGVSVASAAVQYPEGGVWTYGSGNGGAYSNYYHPSKYHSST
VVSRKTGSSDKGYAGAGGTSRAWIRTSWGEKVAFYYNV
>orf02919
(SEQ ID NO: 1048)
MNQENLFLLQEIKDKLLIIIDTVHIAVDFWEDIEPRLGFNGRQTWNILNGIIDEISLLVD
SSTRKKQFID
>orf02920
(SEQ ID NO: 1049)
LLGQNVRAKAHIGQHIEPFDIALNMSLRARQDHPTHTETCYAVGF
>orf02921
(SEQ ID NO: 1050)
MSVHYHAVIDFIRKDNQIVLTGNLNNLQQEFLRIKGSSWVIWIDKDDCLGIGSDF
>orf02923
(SEQ ID NO: 1051)
VTYNRIRQTSHPLCNQKCQQQGDAYNPDSLVNKNSFDITILITNCLHDTYFLGTLHDIDV
NNDTNHNRCYHNSL
>orf02924
(SEQ ID NO: 1052)
LIRQHETVAVLHVIFIIDYTYNLRLKLSNLTSFGSTFYNAG
>orf02954
(SEQ ID NO: 1053)
LHTSFRSSVGHSHTWHQDIVRPILFSRFNDSIVILWQNCPTFN
>orf02968
(SEQ ID NO: 1054)
LRLAKLVPSLKIALKSFSLFTRKFFFKTQLHLLNYYYYTIFFKKANHSKVLDNFIRKRSW
KNNFPNSLY
>orf02973
(SEQ ID NO: 1055)
LKAEQQAIKNIQFLEQDLPKNPLEKEFDCLAVSRVLHHMPDLDADLSLFHQHLKEDGKLI
IADFTKTEANHHGFDLAELENKLIEHGFSSVHSQILYSAEDLFQGNHSEFFLTVSQKSLA
>orf02974
(SEQ ID NO: 1056)
MKHDFNHKAETFDSPKNIFLANLVCQAVEKQIDILSDKVILDFGGGTGLLALPLAKQAKS
VTLVDISEKMLE
>orf02978
(SEQ ID NO: 1057)
MVDLQSFFTRKYLNLNSVDAYLILPRLQGHLSYPQDFFLLQDFCFLLPIFLNLSQKEGRN
AGKDS
>orf02991
(SEQ ID NO: 1058)
VTENPAPFVFTVSINSFFTVVAFTTGTDARNQDLVTFFEVGNSFPNFFNNPNPFVAKNGT
TLASRNIPFDNMEVCSTNSGFYNTHNSICWLANNWFVYINKRSKSWFNIRXXIPFIN
>orf02993
(SEQ ID NO: 1059)
MRIRNSPFDHILQTIFEFEDRTCQVTCRFEACSSICNDNWEFSQHIISVFQSPSCHTVCD
KSDVFCSFLFDKNFASLWIYVVTITDQLCIGMWQLVHGSNHTQFTVSQPTHSIVSMHPNT
RSSIDCFFGFIKSRV
>orf02994
(SEQ ID NO: 1060)
MSKSNRHTFARNCTNKVFHPITFWCKGNFIKQAICRFLPRMKLLNTRVSHISWILCPLKS
FCEIWTFIINPTNLSTCCFFIMVSKIFSDCKQLLISGC
>orf02996
(SEQ ID NO: 1061)
MQCTFNVVVHHIYTCISMNMSIHKSWGNAITCIVNHLSPFRNLLYMFPKLAVHKFQVTTS
TNSVWVEKLIRFNIVRHNVNLLKRLILQFIMSITL
>orf03011
(SEQ ID NO: 1062)
MTLHQTFRFQNLEMPCQSSLINFQTLLNRHLVTRRMLQQKQ
>orf03023
(SEQ ID NO: 1063)
LLSSFQDAVKFFAVVFFRKVQPSQEVAPNASSFTDQFMGG
>orf03025
(SEQ ID NO: 1064)
MVVTTFNDFSIFKDNNLICIENGFQAVGNDETSSTCYNHLHGMLNLAFRHRIYV
>orf03031
(SEQ ID NO: 1065)
MAEFNSVITTVTGIGDRLGAVILAEIRNIHAFDNPAQLQAFAGLDSSIYQSDQIDLAGRM
VKRSSPHLR
>orf03041
(SEQ ID NO: 1066)
MQQYVDIKKQYPDAFLLFRMGDFYELFYEDAVNAAQILEISLTSRNKNADNPIPMAGVPY
HSAQQYIDVLIEQGYKVAIAEQMEDPKQAVGVVKREVVQVITPGTVVDSSKPDSQNNFLV
SIDREGNQFGLAYMDLVTGDFYVTGLLDFTLVCGEIRNLKAREVVLGYDLSEEEEQILSR
QMNLVLSYEKESFEDLHLLDLRLATVEQTASSKLLQYVHRTQMRELNHLKPVIRYEIKDF
LQMDYATKASLDLVENARSGKKQGSLFWLLDETKTAMGMRLLRSWIHRPLIDKERIVQRQ
EVVQVFLDHFFERSDLTDSLKGVYDIERLASRVSFGKTNPKDLLQLATTLSSVPRIRAIL
EGMEQPTLAYLIAQLDAIPELESLISAAIAPEAPHVITDGGIIRTGFDETLDKYRCVLRE
GTSWIAEIEAKERENSGISTLKIDYNKKDGYYFHVTNSQLGNVPAHFFRKATLKNSERFG
TEELARIEGDMLEAREKSANLEYEIFMRIREEVGKYIQRLQALAQGIATVDVLQSLAVVA
ETQHLIRPEFGDDSQIDIRKGRHAVVEKVMGAQTYIPNTIQMAEDTSIQLVTGPNMSGKS
TYMRQLAMTAVMAQLGSYVPAESAHLPIFDAIFTRIGAADDLVSGQSTFMVEMMEANNAI
SHATKNSLILFDELGRGTATYDGMALAQSIIEYIHEHIGAKTLFATHYHELTSLESSLQH
LVNVHVATLEQDGQVTFLHKIEPGPADKSYGIHVAKIAGLPADLLARADKILTQLENQGT
ESPPPMRQTSAVTEQISLFDRAEEHPILAELAKLDVYNMTPMQVMNVLVELKQKL
>orf03051
(SEQ ID NO: 1067)
LTNLSSVDSEELFQFYRERGNAENFIKERKAGFFGDKTDSSTMIKNEVRMMMGCLAYNLY
LFLKQLAGDEVKALTIKRFRRLFLHIAGKYVSTARRHILKFSSLYAYSKQFQALFDTICQ
INLILPVPYRARGQGKTCLTE
>orf03061
(SEQ ID NO: 1068)
LFDDRQAINICPPTNGSLRLTSLQVDQNPCPPSTNLNKILARSQFLNHIQQISLSLELLQ
ANLWNLV
>orf03092
(SEQ ID NO: 1069)
MKIKVQTRKLAAGCSKHCFEVVDRTDEVSSKHGFEVADRTDEVSSKHGFEVADRTDEVSN
IYTVRRR
>orf03093
(SEQ ID NO: 1070)
MDFFNYLLWMICHNHGLHTLLLSKDCVCHTARDKDGNHRIKSVFPTKGQTCYQHDSSIYQ
ERNTTDILTRFLTNSQADDVRPTTGDIVSKSKTNPQTHNNTPKKGIDNGILCQGCHRDKL
DKEGTHRYRDKGKDGELMANLIPS
>orf03104
(SEQ ID NO: 1071)
MIKQIKAHLNKSIQSIIGQKVEFVKQDEQAFTRKRRLSLETMIRTILGMGGKSLSKELLD
ARLTVSNSALVQRRYQIKPEAFYALFKEFTAPIPLNTDFPIFAADGSDICIPRNPMDTET
SIQTQTDVKSYNLIHINALYDLTTGVYRDVSIQDKHAQHERLALIQMMEASPFRESSCYH
G
>orf03108
(SEQ ID NO: 1072)
MAHFQEKGWLYIIRIRDGKQSMPSSFNLPNTECFDQKVSLKLSRKQTNQLKKLYRDFPND
YHFIPHNSIFDFLPETSRKQDPVTLYELPFRMVRLKVEEGKYETLVTNTDYSVQELKNLY
ASRWGIETSFRDLKYSIGLVNFHAKKKEGILQEIFARFTNFNFCRWVTSQVAIDSSHKKQ
RYKVCFSDAAYACRLFFNGSLSSHQLKNYLKKQLSIIRPNRKYSRKIKAQSVVDFICRVT
>orf03110
(SEQ ID NO: 1073)
MCELDILHDSLYQFCPELHLKRLNSLTLACHALLDCKTLTLTELGRNLPTKARTKHNIKR
IDRLLGNRHLHKERLAVYRWHASFICSGNTMPIVLVDWSDIREQKRLMVLRASVALHGRS
VTLYEKAFPLSEQCSKKAHDQFLADLASILPSNTTPLIVSDAGFKVPWYKSVEKLGWYWV
SRVREKVQYAP
>orf03139
(SEQ ID NO: 1074)
LSIQVETLELRVIFKEIKEIVKQFHQLHTMAFKRQVPLTIPVTM
>orf03154
(SEQ ID NO: 1075)
MGALGYYEGFVPYVSNQYKNQAEEEGKPLSDKYIFEKILGKTYAAFKKDQINERVEKLGK
LKPITINYNGKSEVIDSKEKLQELMNKAVKDEVAQIS
>orf03155
(SEQ ID NO: 1076)
MMGDGMKEFQFERKQRFSLRKYAIGACSVLLGTSLFFAGMGAQPVQDTETSSALISSHYL
DEQDLSEKLKSELQWFELENKLLNLWEH
>orf03159
(SEQ ID NO: 1077)
VNITKTSIIKAHTTKEDGIDHIFTRFNIMSIFYSTRKIFLDKLNSTNRQFLGYIISTRCY
QSFNSVSQSIHTSSSSQAFRFGKHEFRVINRDKSKAILVNHYHLNLAFFISNHIVNSDFC
RSSCRCIDSHNWQAFFSRLMKPFIILWFSTICSHDRNTTSCILWRTPAKTDDKVTAMFLQ
SSYPICDIFTSRVWLYIAKDDIFDSFCIQWF
>orf03175
(SEQ ID NO: 1078)
MSMDNCIDIITSLILNQMHIPFARWQAFSLYNISINIHHYNIGFFDFKEINTRRGNCHQL
FFTIENAEIPTCSFRQICFY
>orf03182
(SEQ ID NO: 1079)
MNIAIRIILNFFRVMGNHQNSLAMMMGAVVHEFVKFIFTSCIHPRCRLV
>orf03183
(SEQ ID NO: 1080)
MLLIMSIQTTEPAFSRIATRLDKFIDRTWKTSIKTGNLLRKIGYSQFLTLRICL
>orf03184
(SEQ ID NO: 1081)
LQNSKTSLDERRLSRSIFFSQGNKFPTINTIIDMFKNRLLIIIEGQILYRNISHYLISPT
KAVKNR
>orf03197
(SEQ ID NO: 1082)
MSNSFVKLLVSQLFANLADIFFRVTIIANIYIISKSVIATSLVPILIGISSFVASLLVPL
VTKRLALNRVLSLSQFGKTILLAILVGMFTVMQSVAPLVTYLFVVAISILDGFAAPVSYA
IVPRYATDLGKANSALSMTGEAVQLIGWGLGGLLFATIGLLPTTFIILVLYIISSFLMLF
LPNAEVEVLESETNLEILLKGWKLVARNPRLRLFVSANLLEIFSNTIWVSSIILVFVTEL
LNKTESYWGYSNTAYSIGIIISGLIAFRLSEKFLAAKWESILFPLVAMAIVTLTILYFPN
AQMFLLFSALVGMLSQLKEVPESVFLQETVEENHLVNVYSVLEVISTLAFSVFVLLMSYI
TESFGISISFWLSAICLMIEAILIYIRRDYFK
>orf03198
(SEQ ID NO: 1083)
MSKLLDKILSRENMLEAYNQVKSNKGSAGIDGMTIEEMDNYLRQNWRLTKELIKQRKYKP
QPVLKVEIPKPDGGIRQLGIPTVMDRMIQQAIVQVMSPICEPHFSDTSYDFRPNRSCEKA
IMKLLEYLNDGYEWIVDIDLEKFFDTVPQDRLMSLVHNIIEDGDTESLIRKYLHSGVIIN
GQRYKTLVGTPQGGNLSPLLSNIMLNELDKELEKRGLRFVRYADDCVITVGSEAASKRVM
YSVSRFIEKRLGLKVNMTKRVEISRFWVLEIIRWLEKPSTSR
>orf03202
(SEQ ID NO: 1084)
MFLRCATFKLADSRLNIFTCFFFGEIRFNSRNQVVKAFITDGTVISTIIVRGTVPCNQWT
KTCPAAFDIINGDVGFWKAVVDNAK
>orf03203
(SEQ ID NO: 1085)
MLQITCVVCISCTKVSLVFTWENKDHTTVTQTCVKVNWL
>orf03204
(SEQ ID NO: 1086)
LRSLIRQITYFITPRTCCINNQTGLDFKHLVCQEITSYNTCNLATFVKEEAFCLHVVGNE
GTVLVGTFDVFNHETRIVVTEVKIHSTSYQAFLLQVWLAFQDLILAQNLVRSWCVAHTC
>orf03205
(SEQ ID NO: 1087)
LHFNQTSLKTASCRLQGYTSSCDSSTDNQEVQGAFLHFFN
>orf03216
(SEQ ID NO: 1088)
LKIDHTQLSPSNLLNTFVTPFIFYLKHSINLTNAEIICFSFYFHADFLVHYPENQ
>orf03224
(SEQ ID NO: 1089)
LKKVQHTQNVDFNKKLSRIKTKYLYGLKEKSEAELTLKTKETKEELTAAFEQFKKDTLKS
GKKVAEAEKKAKAQKEEDRRNYPTNTYKTIELEIAEAEVGVAKAELELEFAQAQVQIPQD
TEKINAAKSKVEAAKSNVKKLEKIKSDIEKTYLYKLDNSTKETPKSRVRRNSPQVGDSRE
LKETIDKAKETLSTYMVTRLTKLDPSVFWFADLLMDAKKVVEEYKTKLEDASDKKSVEDL
RKEAEGKIESLIVTHQNREKENQPAPQPGGQAGGSMVVPPVTQTPPSTSQSPGQKATEAE
KKKLQDLIRQFQEALNKLDDETKTVPDGAKLTGEAGKAYNETRTYAKEVVDKSKKLLSQT
AVTMDELAMQLTKLNDAMSKLKEAKAKLVPEVKPQPENPEPKPQPEGEKPSVPDINQEKE
KAKLAIATYMSKILDDIKKHHLKKEKHHQIVALIKDLDKLKKQALSEIDNVNTKVEIENT
VHKVFADMDTVVTKFQKGLIQNTPQVPEAPKSPEVPKVSDTPKAPDTPQVPEAPKSPEVP
KVPEAPKAPDTPQVPEAPKSPEVPKVPDTPKAPDTPQVPEAPKSPEVPKVPDTPKAPDTP
QVPEAPKAPDTPQIPEAPAPETPKTGWKQENGMWYFYNTDGSMATGWLEYNGSWYYLNAN
GAMATGWLEYNGSWYYLNTNGAMETGWLEYNGSWYYLNTNGAMETGWLEYNGSWYYLNTN
GAMETGWLEYNGSWYYLNTNGAMETGWLEYNGSWYYLNTNGAMETGWLEYNGSWYYLNTN
GAMETGWLEYNGSWYYLNANGSMATGWLKDGDTWYYLEASGAMKESQWFKVSDKWYYVNG
SGALAVNTTVGGYRVNANGKWVN
>orf03230
(SEQ ID NO: 1090)
MDREILKFFQDLLSILSHNDMITLFCQKCCNSFSNHFLVICN
>orf03232
(SEQ ID NO: 1091)
MFITLRRICLRACVVEKEQSYLKFLFFQKRPVSFLHVKSVLAGI
>orf03233
(SEQ ID NO: 1092)
MVKTTNRLEAIGFSFILFENLFKPRQLYLQPQTSVLSNLRLAA
>orf03239
(SEQ ID NO: 1093)
MTRKLNPSYTNVASATTLTFNQVASTFRKACLDHVVNLTRNNLKGICQLTPLQLHDTRLI
>orf03270
(SEQ ID NO: 1094)
MRTFFLYSSAFKKHSSPSPINDGLYHLLLQSLYNILELIHDIFQSLKGFILKSTFTNLFP
HLFNGVHLWCVWRNKCKANISRNL
>orf03277
(SEQ ID NO: 1095)
LVSVFYSLLQVDNVDSVTFSKDVLSHLRIPATSLVTKVYTSLKKLFH
>orf03286
(SEQ ID NO: 1096)
LIVWILKNHTDLTTYIPNIFLSQTLAINYNLSRFCFQ
>orf03287
(SEQ ID NO: 1097)
MPYNRKPFSTFHVKRNILHIVVVLIFFITKRKIFYINY
>orf03291
(SEQ ID NO: 1098)
MFKKMSNSSRILFYISVNFCDKRIYRTKLYSDTPVNLFKFLFRQKSNCQSIGQTSSINLF
FYSWIVFFFKNNLCHSIPSIK
>orf03304
(SEQ ID NO: 1099)
LADGSGKLAEGGTKLTSGLEDLQTGLASLGQGLGNASDQLKSVSTESKNAEILSNPLNLS
KTDNDQVPVNGIAIAPYMISVALFFAAISTNMIFAKLPSGRHPESRWAWLKS
>orf03310
(SEQ ID NO: 1100)
MKNTVKLEQFVALKEKDLQKIKGGEMRLSKFFRDFILQRKK
>orf03330
(SEQ ID NO: 1101)
LVEQLTFNQWVTGSSPVRVIYAGLAELADAPDLGSGA
>orf03344
(SEQ ID NO: 1102)
MKIKEQTRKLAAGCSKHCFEVVDETDEVSNHTYGKVKLTWFEEIFE
>orf03352
(SEQ ID NO: 1103)
LIDVLFINSFIGRICFYCYRRIHATCLFLQLFSIVILNVAHTLKHSIFIVITFISRCRNF
IIVRILLENQFSRNQGIDNRVGQSRY
>orf03353
(SEQ ID NO: 1104)
MVNVNQVSIEVKNTFKNWNFTSSIELTTFSKFSQSPTMT
>orf03364
(SEQ ID NO: 1105)
MGFSMKLIHDLDMHTTHSTAKMLYNVKAIKNDFSIRE
>orf03368
(SEQ ID NO: 1106)
LKSVGSRVEDKRYQETIVATFSDILKRSREMQDQNIKXXFIH
>orf03372
(SEQ ID NO: 1107)
MLTIEPTKAPLVNVCDTANTARIDDEPYSPGDFXXHSIH
>orf03373
(SEQ ID NO: 1108)
MRWNIGCHPNRDTSCSINQKVWKTRWQDQGFPFIGIIVINEINCIFVDITKHFQSNLAHT
CLGITLSGSTISIHGTKIPMTIYKHVTVAPPLSHTDHGFINRGIPVWVIFTHDIPCNTSR
FFMGFVWGHTQFIHSVKNATVNRF
>orf03380
(SEQ ID NO: 1109)
MTDENTFLQLSEGWSLFRSDFLLCIKHFLNSFSSSKGQLKASPTRCNLDNRLVVLL
>orf03390
(SEQ ID NO: 1110)
MGGNPPMKKYSIVDKIVLSTKIKRIIIFTVFRENWEPYMKKYTEVFQSQFPNLNIDYLLL
DTEQIDLDSYLDADIIIIGGGNTEKYIATYVNQEFKNYIDHMLNKGAKVIGFSAGALLLG
EKVYVSPNDNSDHQIKIKDGLGLFSQFLISVYYDSWNDKANKDRAEELVNVPIIPLNDHS
CLVLDKLGNIIEKID
>orf03393
(SEQ ID NO: 1111)
MYGGEAKSNAMEAIQAAKKGDFSKANRRLADANAALLQAHKAQTEMLTREAQGEKTSISL
LMVHAQDHLMTSLTFVDLAKEVVEVYERFEKN
>orf03396
(SEQ ID NO: 1112)
MLARSKNCFMKSLSIFLLIFYFFDSYQISKKRRSLIGL
>orf03399
(SEQ ID NO: 1113)
VTAHRIFGTSSIHSKLIGLAMLGITAMKIICHKLNRNHINIFRRLGIQGKTEFLLIHLIR
QVKMNHLSQGMNPTICPTSTVNSNGLPFI
>orf03402
(SEQ ID NO: 1114)
MLKNGIISWKDFKSFFCQGCQTSHCYKPMQAVQGIGSQIS
>orf03403
(SEQ ID NO: 1115)
MRFLADQDRIQHHRYSWALFDKVQGLLSHADSREKTNLNSPKFHITQAI
>orf03405
(SEQ ID NO: 1116)
MSYGRPYILNVDGAIHDGWLAISNYENSLNKDYLFYILSSNVVYSQGLSLISGAVVKNLN
SDKVASILIPLPPLAEQQRIIEAIESALEKVDEYAESYNRLEQLDKEFPDKLKKSILQYA
MQGKLVEQDPNDESVEVLLEKIRAEKQKLFEEGKIKKKDLDISIVSQGDDNSYYEEVPCE
IPESWEWVRLNDITSYIQRGKSPKYSNIPIYPVIAQKCNQWSGFSIDLARFIDPETVHSY
QKERLLRDGDLMWNSTGLGTLGRLAIYHENKNPYVWAVADSHVTVIRVLSGVINCHFIYN
FLSSPIVQSVIEEKASGSTKQKELLTKTIKEYLIPLPPLPEQSRIVDRIEQFFAHIDALI
>orf03424
(SEQ ID NO: 1117)
LAQISILHFDFLSIDKHSHTVFNTLRKSLQTTLALSATSKQCFEQLAASFLVCSLIFIEY
KV
>orf03430
(SEQ ID NO: 1118)
MGFKVSHFKIPSSHLSINVLRTVENFTEIGQGLLHISP
>orf03431
(SEQ ID NO: 1119)
VGFFDFGLTNSCRQVRQFTQTVQDFLVCCHQGIVKEGQGYAGICFKFHPSLGNIGKFVIA
IVRRLRHKSIVANMAHLNVDLFQFRKGLLEILKSVKIALVITAKLVDVFASFLDCTQEIL
TVLV
>orf03439
(SEQ ID NO: 1120)
MNITYIVGNGLDLQYGLKTRYRDFYEFQNKVYISRTENEEKYSNFIYESLFSDKVNDYEN
WSDFELSIGKLTKDNDLISSSIEIKEKFIDDFSEVVDDLREYLRIQQEKNLEKGNAIDFI
STLDDMRTSLPVINQPAIDKKYNENPHQDDIVNIVTLNYTHVIDKLYNGSAKSFRNQLRA
NLYNFYIEPPIHAHGTVDVCTVLGVSDEIQISNSFDEEQKESLIKNLVLKNYRENMDVKN
SDIIKNSDIIILYGVSLGETDGYIWNQIAEQSIRSSVPVIIYHYVPHFDAGNPTRVKRLY
RNVEDKFIQNSGIDLELEKKLRDNLIVVIGKTIFNLMER
>orf03440
(SEQ ID NO: 1121)
VGAKFNDEKTKHIVTHYISRDALNKTITVLSKIIEVFEEHFDRAITCEMFSDSSTFASIN
FSEYGISKSKFQQYLRDSCFIENFGVEHTTVSDIQNSIVTFYDVHTDIFRLLNKLNIDIS
EANIMNQTTVLLDEKNIELLLSKAPYLVSMIVEDFSKLSVDDFSLDNNDLKINLPSPMNE
PVVGVIDTLFDKRVYFNEWVEYHDFVSPDISKDSQDYKHGTAVTSLIVDGANLNPNLDDG
CGNFRVRHFGVSLQSGFNSFTIIKQIKEIVSQNADIKVWNLSLGSNDEIRENFISAEGAL
LDEIQFENDVIFIIAGTNASVINGKRKRIGAPADSLNSIIVNSVDFNNQSVSYSREGIVL
SFFVKPDVSYYGGGNGDFINVCEPLGLGRVAGTSFAAPFIARKMAYLIHIMGLSREEAKA
LLIDAAIPWNDKKTFTDLSLIGNGIVPIKMDDILSTPDDEIKFIVSDISRAYDTYNYDFP
VPISSESYPYVAKATMCYFPNCSRKQGVDYTNTEMQLTFGRLKSDGIKSINKDNQHAEDT
PGYVRENAARNIFRKWDNVKHIGESFTSRKRAKAILNPSNPQWGMSIKTIERLKSGDGQG
VRFGVVVTLKELNGVNRIEDFIQQAELRGWLVNRLQVEAQVDLFNSLNEEIEFE
>orf03442
(SEQ ID NO: 1122)
MFVADIMISDYSSAPIDFLLLNRVVFLYLPDFKEYQSDKNPFFEVFKVSKTKGIALDPFD
EIIGRFQFGVRIV
>orf03450
(SEQ ID NO: 1124)
MGFSMKLIHDLNTHTTHSTAKMLYNVKAIKNDFSIRE
>orf03453
(SEQ ID NO: 1125)
MEQLHFITKLLDIKDTNTQIIDVVNRDSHKEIIAKLDYDAPSCPECGSQMKKYDFQKPSK
IPYLETTGMPTRILLRKRRFKCYHCSKMMVAETPLVKKNHQIPRIINQKIAQKLIEKISM
TDIAHQLSISTSTVIRKLNDFHFECNFRNLPKIMSWDVETVRGVTVSIGRWR
>orf03462
(SEQ ID NO: 1126)
LDPWDGNSQKPRFQGLWKFIQRDSRKWRERRFYGPTFGKHLTNKKVFDKVFELFTRPGNI
IIIFINFCGFTSEIRNRGKFFGLIEDNLKQVHPIFQTVFKTFLKDKEKIINALQLHYSNA
KPEATNNLIKLIKRNAFGFRNFENFKKRIFIALNIKKERTKFVLSRA
>orf03466
(SEQ ID NO: 1127)
MVLYFWKVFQRVPNKLWKNMGENFQVRSLQDKIIQNLTNKGFSYFDAKMPIDEWDSQVDE
ETTQELISRDLISNILSMPESMKDTN
>orf03469
(SEQ ID NO: 1128)
MSKSHSFSISLGISNSFWNNIHTSECWYFLAEGKSNRSNSTISVNQMVFFINIQRFYCFA
IEDFCLLRI
>orf03470
(SEQ ID NO: 1129)
LNTLLPPDNLCLFTIYLTGFSCICINSYCHNFWEIFNQLFYQLS
>orf03475
(SEQ ID NO: 1130)
MKLLSIAISSYNAAAYLHYCVESLVIGGEQVGILIINDGSQDQTQEIAECLASKYPNIVR
AIYQENKCHGGAVNRGLAEASGRYFKVVDSDDWVDPRAYLKILETLQELESKGQEVDVFV
TNFVYEKEGQSRKKSMSYDSVLPVRQIFGWDQVGNFSKGQYTMMHSLIYRTDLLRASQF
>orf03476
(SEQ ID NO: 1131)
MYYLPVDFYRYLIGREDQSVNEQVMIKCIDQQLKVNRLLIDQLDLSQVSHPKMREYLLNH
IEITTVISSTLLNRSGTAEHLAKKRQLWTYIQQKNPEVFQAIRKTMLSRLTKHSVLPDRK
LSNVVYQITKSVYGFN
>orf03484
(SEQ ID NO: 1132)
MKRIQLNMNETKKYLVIKAIAQGKKTKKRACVELNLSERQINRLLLAYQQKGKEAFRHGH
GNRNRKPKHAIPDEIKERVLKKYLSYETYKPNVLHFCELLAEEEGIKLSDTTVRKILYKK
NILSPKSHRKTKKRVRKQAKLNLNQPLDNPILPTAKDFLEDPKKVHPSRPRKKFAGELIQ
MDASPHAWFGPETTNLHLAIDDASGNILGAYFDKQETLNAYYHVLEQILANHGIPLQMKT
DKRTVFTYQALQL

[0422] In some embodiments, preferred INV200 antigens are selected from the polypeptides orf00159 (SEQ ID NO: 626), orf00162 (SEQ ID NO: 628), orf00163 (SEQ ID NO: 629), orf00164 (SEQ ID NO: 630), orf00165 (SEQ ID NO: 631), orf00166 (SEQ ID NO: 632), orf00201 (SEQ ID NO: 639), orf00209 (SEQ ID NO: 645), orf01109 (SEQ ID NO: 747), orf01137 (SEQ ID NO: 751), orf01138 (SEQ ID NO: 752), orf01309 (SEQ ID NO: 783), orf01313 (SEQ ID NO: 786), orf011315 (SEQ ID NO: 787), orf01431 (SEQ ID NO: 810), orf01433 (SEQ ID NO: 812), orf01434 (SEQ ID NO: 813), orf01537 (SEQ ID NO: 824), orf01588 (SEQ ID NO: 831), orf011642 (SEQ ID NO: 842), orf01656 (SEQ ID NO: 847), orf01800 (SEQ ID NO: 875), orf01801 (SEQ ID NO: 876), orf01810 (SEQ ID NO: 879), orf01812 (SEQ ID NO: 880), orf01818 (SEQ ID NO: 882), orf01988 (SEQ ID NO: 913), orf01989 (SEQ ID NO: 914), orf02105 (SEQ ID NO: 925), orf02106 (SEQ ID NO: 926), orf02263 (SEQ ID NO: 947), orf02264 (SEQ ID NO: 948), orf02459 (SEQ ID NO: 968), orf02538 (SEQ ID NO: 987), orf02539 (SEQ ID NO: 988), orf02541 (SEQ ID NO: 990), orf02545 (SEQ ID NO: 992), orf02604 (SEQ ID NO: 1003), orf02608 (SEQ ID NO: 1007), orf02609 (SEQ ID NO: 1008), orf02850 (SEQ ID NO: 1036), orf03197 (SEQ ID NO: 1082), orf03439 (SEQ ID NO: 1120), orf03448 (SEQ ID NO: 1123), and immunogenic fragments thereof.

7. Sequences Identified from 23F
>orf00010
(SEQ ID NO: 1133)
LPVTFDFLIEGSTKGNIDKLDTATDCHNWFILTKRFLQECQFKFVTDQIVIIAFDGLFLS
IKLRMNILASCQNEFVNHFHIITYN
>orf00017
(SEQ ID NO: 1134)
MSLITHKRFISCNENIKHYKRLIDKAKKCVNDLMAEFNSVITTVTGIENRLGAVILAEIR
NIHAFDNPAQLQAFAGLDSSIYQSGQIDLAGRMVKRGSPHLR
>orf00027
(SEQ ID NO: 1135)
MQQYVDIKKQYPDAFLLFRMGDFYELFYEDAVNAAQILEISLTSRNKNADNPIPMAGVPY
HSAQQYIDVLIEQGYKVAIAEQMEDPKQAVGVVKREVVQVITPGTVVDSSKPDSQNNFLV
SIDREGNQFGLAYMDLVTGDFYVTGLLDFTLVCGEIRNLKAREVVLGYDLSEEEEQILSR
QMNLVLSYEKESFEDLHLLDLRLATVEQTASSKLLQYVHRTQMRELNHLKPVIRYEIKDF
LQMDYATKASLDLVENARSGKKQGSLFWLLDETKTAMGMRLLRSWIHRPLIDKERIVQRQ
EVVQVFLDHFFERSDLTDSLKGVYDIERLASRVSFGKTNPKDLLQLATTLSSVPRIRAIL
EGMEQPTLAYLIAQLDAIPELESLISAAIAPEAPHVITDGGIIRTGFDETLDKYRCVLRE
GTSWIAEIEAKERENSGISTLKIDYNKKDGYYFHVTNSQLGNVPAHFFRKATLKNSERFG
TEELARIEGDMLEAREKSANLEYEIFMRIREEVGKYIQRLQALAQGIATVDVLQSLAVVA
ETQHLIRPEFGDDSQIDIRKGRHAVVEKVMGAQTYIPNTIQMAEDTSIQLVTGPNMSGKS
TYMRQLAMTAVMAQLGSYVPAESAHLPIFDAIFTRIGAADDLVSGQSTFMVEMMEANNAI
SHATKNSLILFDELGRGTATYDGMALAQSIIEYIHEHIGAKTLFATHYHELTSLESSLQH
LVNVHVATLEQDGQVTFLHKIEPGPADKSYGIHVAKIAGLPADLLARADKILTQLENQGT
ESPPPMRQTSAVTEQISLFDRAEEHPILAELAKLDVYNMTPMQVMNVLVELKQKL
>orf00033
(SEQ ID NO: 1136)
MRRKYKSIALKKELANDSGKKKFHAMKAQAIVTSQGRIVSIAMI
>orf00042
(SEQ ID NO: 1137)
LTNLSSVDSEELFQFYRERGNAENFIKERKAGFFGDKTDSSTMIKNEVRMMMGCLAYNLY
LFLKQLAGDEVKALTIKRFRRLFLHIAGKYVSTARRHILKFSSLYAYSKQFQALFDTICQ
INLILPVPYRARGQGKTA
>orf00051
(SEQ ID NO: 1138)
LFDDRQAINICPPTNGSLRLTSLQVDQNPCPPSTNLNKILARSQFLNHIQQISLSLELLQ
ANLWNLV
>orf00055
(SEQ ID NO: 1139)
LSVHFCSSHRCLLVRYNDTYSTKKGLKFETFLSVFRYDFLGM
>orf00086
(SEQ ID NO: 1140)
VDRTDEVSSKHGFEVVDETDEVSSKHGFEVADRTDEVSSKHGFEVADRTDEVSSKHGFEV
ADRTDEVSSKHGFEVADRTDEVSSKHGFEVADRTDEVSSKHGFEVADRTDEVSSKHGFEV
ADRTDEVSSKHGFEVADRTDEVSSKHGFEVADRTDEVSNIYTAR
>orf00088
(SEQ ID NO: 1141)
MDFFNYLLWMICHNHGLHTLLLSKDCVCHTARDKDGNHRIKSVFPTKGQTCYQHDSSIYQ
ERNTTDILTRFLANSQADDIRPTTGDIVSKSKTNPQTHNNTPKKGIDNGILRQGCHRDKL
DKEGTHRYRDKGKDGELMANLIPS
>orf00096
(SEQ ID NO: 1142)
MKIKEQTRKLAAGCSKHCFEVVDETDEVSSKHGFEVVDETDEVSSKHGFEVVDETDEVSN
HTYGKATLTWFEEIFEEY
>orf00103
(SEQ ID NO: 1143)
LQNDKNHKLFDNYTCQKEKDVLRCKQVKRKEERSYDVGTRIYTIYDFLLF
>orf00105
(SEQ ID NO: 1144)
MKIKEQTRKLAAGCSKHCFEVMDRTDEVSSKHGFEVVDETDEVSNHTYGEVKLTWFEEIF
EEY
>orf00106
(SEQ ID NO: 1145)
LFFKDEKQALYTKPKTKSSSFRASKVSNQTIVATTRTDCQVIALNLCDKLENGVVVVVQT
THHIGIDDVIYSKIFQHLTHSIKMSLAFFIKKVQDRRRILYCHLVFFFLRVQDTKRIFLQ
ATLAILRQGLLERCQIVNQGLAVGCTALRISKSVEVQFDTLNTDFLQKMGCHSDCFHIGS
WIARAKTLNTNLVELAQAPCLWTLITEHRSHVVELAWLLHFWGEEFIFHIGTDNGRSSFW
TEGNMAVTLVIEIVHFLGYDIGRISDRAADNLVMLKNGRAHFCVVVALENFTGKALNVLP
FGRFSR
>orf00114
(SEQ ID NO: 1146)
MEQIGKVFRQLRESRNISLRQATGGQFSPSMLSRFETGQSELSVEKFLFALENISASVEE
ILFLARGFQYDTDSELRKEITDVLEPKNVAPLEDLYRREYQKHAHSHNKQKHILNAIMIK
SYMKSMDERVELTAEEGKVLHDYLFSTEIWGIYELNLFSVSSPFLSVSLFTRYVREMVRK
SDFLMEMSGNRNLFYTILLNGFLASIECEEFTNAYYFKRVIEEHFYKENETYFRIVYLWA
EGLLDSKQGRVKEGQKKMEDAVRIFEMLGCNKSAEYYRNTTEC
>orf00118
(SEQ ID NO: 1147)
MQEHYTPKGKHLTIDNRRLIERWKNENKSNREIAGLLGKAPQTIHTEVKRGTTLQQVRKG
LYKKVYSADYAQTVYQFNRKRSVKKLILTKEIREKILHYHKQKFSPEMMVNKKQVKVGIS
TIYYWFHNGHLGLTKADMLYPRKRKGVKKQASPNFKPAGKSIEERPDVINLRLENGHYEI
DTVLLTKIKNYCLLVLTDRRSRHQIIRLIPNKTAESVNQALTLLLGEHHILSITADNGSE
FKRLSEVFPEEHIYYAHAYSSWERGSNENHNRLIRRWLPKGTKKTTPKEVAFIENWINNY
PKKCLDYKSPSEFLLGG
>orf00121
(SEQ ID NO: 1148)
MKIKGQTRKLAAGCSKHCFEVVDRTDEVSNHTYGKATLT
>orf00124
(SEQ ID NO: 1149)
VVPFSDTFKDRNQVDIFTIKISRCNSSTIGENSWDIHISNSNHRSRHVLVTATDSDEGIH
VVTTHSRLDGVRDDVTRC
>orf00139
(SEQ ID NO: 1150)
MDLKFEGVDLEYKKAKNNLPESFWETYSAFANTNGGKIILGIDEKNIDTYQRVNRLPAKL
>orf00156
(SEQ ID NO: 1151)
LSIQVETLELRVIFKEIKEIVKQFHQLHTMAFKRQVPLTVPVTM
>orf00171
(SEQ ID NO: 1152)
VQKLKKAIYKAHLKDSDDFRPETSTPNLFESCLKLCPCFLSS
>orf00172
(SEQ ID NO: 1153)
MGALGYYEGFVPYVSNQYKNQAEEEGKPLSDKYIFEKILGKTYAAFKKDQINERVEKLGK
LKPITINYNGKSEVIDSKEKLQELMNKAVKDEVAQI
>orf00173
(SEQ ID NO: 1154)
MMGDGMKEFQFERKQRFSLRKYAIGACSVLLGTSLFFAGMGDQPVQDTETSSALISSHYL
DEQDLSEKLKSELQWFELENKLLNLWEH
>orf00177
(SEQ ID NO: 1155)
VNIAKTSIIKAHTTKEDGIDHTFTRFNIMSIFYSTRKIFLDKLNSTNRQFLGYIISTRCY
QSFNSVSQSIHTSSSSQAFRFGKHEFRVINRDKSKAILVNHYHLNLAFFISNHIVNGNFC
>orf00178
(SEQ ID NO: 1156)
MKPFIILWSSTICSHDRNTTSCILWRTPAKTDDKVTAMFLQSSYPICDIFTSRVWLYIAK
DDIFDSFCIQWF
>orf00194
(SEQ ID NO: 1157)
MHIPFARWQAFSLYNISINIHHYNIGFFDFKEINTRRGNCHQLFFTIENTEIPTCSFRQI
CFY
>orf00205
(SEQ ID NO: 1158)
MNIAIRIILNFFRVMGNHQNSLAMMMGAVVHEFVKFIFTSCIHPRCRLV
>orf00206
(SEQ ID NO: 1159)
MLLIMSIQTTEPAFSRIATRLDKFIDRTWKTSIKTGNLLRKIGYSQFLTLRICL
>orf00207
(SEQ ID NO: 1160)
LQNSKTSLDERRLSRSIFPSQGNKFPTINTIIDMFKNRLLIIIEGQILYRNISHYLISPT
KAVKNR
>orf00220
(SEQ ID NO: 1161)
MSNSFVKLLVSQLFANLADIFFRVTIIANIYIISKSVIATSLVPILIGISSFVASLLVPL
VTKRLALNRVLSLSQFGKTILLAILVGMFTVMQSVAPLVTYLFVVAISILDGFAAPVSYA
IVPRYATDLGKANSALSMTGEAVQLIGWGLGGLLFATIGLLPTTFIILVLYIISSFLMLF
LPNAEVEVLESETNLEILLKGWKLVARNPRLRLFVSANLLEIFSNTIWVSSIILVFVTEL
LNKTESYWGYSNTAYSIGIIISGLIAFRLSEKFLAAKWESILFPLVAMAIVTLTILYFPN
AQMFLLFSALVGMLSQLKEVPESVFLQETVEENHLVNVYSVLEVISTLAFSVFVLLMSYI
TESFGISISFWLSAICLMIEAILIYIRRDYFK
>orf00221
(SEQ ID NO: 1162)
MSLVHNIIEDGDTESLIRKYLHSGVIINGQRYKTLVGTPQGGNLSPLLSNIMLNELDKEL
EKRGLRFVRYADDCVITVGSEAASKRVMYSVSRFIEKRLGLKVNMTKTKITRPRELKYLG
FGFWKSSDGWKSRPHQDSVRRFKLKLKKLTHRKWSIDLTRRIEQLNLSIRGWISYFSLGN
MKV
>orf00222
(SEQ ID NO: 1163)
MSKLLDKILSRENMLEAYNQVKSNKGSAGIDGMTIEEMDNYLRQNWRLTKELIKQRKYKP
QPVLKVEIPKPDGGIRQLGIPTVMDRMIQQAIVQVMSPICEPHFSDTSYGFRPNRSCEKA
IMKLLEYLNDGYEWIVD
>orf00229
(SEQ ID NO: 1164)
LHFNQTSLKTASCRLQGYTSSCDSSTDNQEVQGAFLHFFN
>orf00247
(SEQ ID NO: 1165)
MFCLTFICLIRRSGYLGSYLLLCRMNHTSHKKTGNSYTSYSNTKFTN
>orf00248
(SEQ ID NO: 1166)
LPSEIKAKLDAAFEQFKKDTLPTEPGKKVAEAEKKVEEAKKKAEDQKEKDLRNYPTNTYK
TLELDIAESDVEVKKAELELVKEEAKESRDEKKINQAKAKVENKKAEATRLKNIKTDREK
AEEAKRRADAKLQEANVATSEQDKSKRRAKREVLGELATPDKKENDAKSSDSSVGEETLT
SPSLKPEKKVAEAEKKVEEAKKKAEDQKEEDRRNYPTNTYKTLELEIAESDVEVKKAELE
LVKEEAKESRDEKKINQAKAKVENKKAEATRLKNIKTDREKAEEAKRRADAKLQEANVAT
SEQDKSKRRAKREVLGELATPDKKENDAKSSDSSVGEETLTSPSLKPEKKVAEAEKKVEE
AKKKAEDQKEEDRRNYPTNTYKTLELEIAESDVEVKKAELELVKEEAKESRNEEKIKQVK
AKVESKKAEATRLENIKTDRKKAEEEEAKRRAAEEDKVKEKPAEQPQPAPAPQPEKPTEE
PENPAPAPAPKPENPAEKPKAEKPADQQAEEDYARRSEEEYNRLTQQQPPKAEKPAQPST
PKTGWKQENGMWYFYNTDGSMATGWLQNNGSWYYLNSNGAMATGWLQNNGSWYYLNANGS
MATGWLQNNGSWYYLNANGSMATGWLQYNGSWYYLNANGDMATGWLQNNGSWYYLNANGD
MATGWLQNNGSWYYLNANGDMATGWLQYNGSWYYLNANGDMETGWVKDGDTWYYLEASGA
MKASQWFKVSDKWYYVNGSGALAVNTTVDGYGVNANGEWVN
>orf00254
(SEQ ID NO: 1167)
MDREILKFFQDLLSILSHNDMITLFCQKCCNSFSNHFLVICN
>orf00261
(SEQ ID NO: 1168)
MTRKLNPSYTNVASATTLTFNQVASTFRKACLDHVVNLTRNNLKGICQLTPLQLHDTRLI
>orf00300
(SEQ ID NO: 1169)
LVSVFYSLLQVDNVDSVTFSKDVLSHLRIPATSLVTKVYTSLKKLFH
>orf00309
(SEQ ID NO: 1170)
LIVWILKNHTDLTTYIPNIFLSQTLAINYNLSGFCFQ
>orf00310
(SEQ ID NO: 1171)
MPYNRKPFSTFHVKRNILHIVVVLIFFIAKRKIFYINY
>orf00314
(SEQ ID NO: 1172)
MFKKMSNSSRILFYISVNFCDKRIYRTKLYSDTPVNLFKFLFRQKSNCQSVGQTSSINLF
FYSWIVFFFKNNLCHSIPSIK
>orf00327
(SEQ ID NO: 1173)
LADGSRKLAEGGTKLTSGLEDLQTGLASLGQGLGNASDQLKSVSTESKNAEILSNPLNLS
KTDNDQVPVNGIAIAPYMISVALFLQQYQQI
>orf00356
(SEQ ID NO: 1174)
MEMSFIAQDFDKLNIITVLESRTQAIIRNPMNTRLSSATGSSFNKIVRN
>orf00358
(SEQ ID NO: 1175)
MELAETSIVKKNHQIPCIINQKIAQKLIEKTSMTDIDHQLSISTSTVIRKINNFHFEHDF
SRLPEIMS
>orf00364
(SEQ ID NO: 1176)
MNYIDTNEMLFVETPRKVITSDELRKKNTKYLDQKEFKLFIQNLKDEALCDYRITKYIRI
AKVLFLTGMRYGELAALNYKEDIDFSKKTIHIKHTYDFRQKERTTPKTIKSDRVITAPQK
VLDIIKEQIIENATNGFDTDFIFINTLGEPITNARVICALKRHGQKIGIEKNITTHTFRH
SHISLLAELGIPLTAIMDRVGHSDSKTTLEIYSHVTQKMVSDISSKLDKIKF
>orf00365
(SEQ ID NO: 1177)
MWMEELPNGKYKFFERYKDPYTEKLKKVSVTMEKKTPQARNQAAILLQEKIKQKLGEKQH
SVSNITFEKLYEEFEENWKHGVKNSTVYASKNVKKEILKQIEGDYLVRNLIDVYYKK
>orf00367
(SEQ ID NO: 1178)
MEIDKVKADLKQVGKRVADLSQSITNEEQTKNAFIMPFFQALGYDIFNPLEFVPEFTADV
GIKKGEKVDYAIILDGEPQILIECKSITENLTKHDSQLFRYFVTTKSKFGILTNGREYKF
FTDLDEPNKMDTTPFLTIDVTDIKENQFTEIIKFHKENFDIDNIVSSASELKYLNNLKAF
LTENITTPSDSFLRYLTSEIYEGRVTQNILTTFSPIIVKGFNQFITERVNEKLSAALNTS
VETKVTTDIPKVEAEAEEIVEVTDEIITTPAELEVYTVVKMLARDVVSPERVFYRDNRSY
FNVLVDDNIKKWVLRYRSNSKKSTIEIRDKGIFPVSTPLEVANYANEILEVIKKFS
>orf00368
(SEQ ID NO: 1179)
MTLAKLCEEYQVELCLFDGSNWHNSGFYNPDTNVLAIDHNLTPEQQIQVALHELGHKDHT
RSEHQNARLRCENEADRNMIHHLVKDALENLDDPTEFDYLKFMSYYNLKTMTNEIMVKEE
YLALVN
>orf00369
(SEQ ID NO: 1180)
MYRLDIDKKALKQLKKLDTPTRKQILSWLAKNIENTTNPRQHGKALKANLAGYWRYRVEN
YRIICDIQDDKLVVLAVEIAHRRDVYK
>orf00370
(SEQ ID NO: 1181)
MTITINFTEKNSYITDYLNKHGIDTTTMDFDDFMALMEDIEDARAADQAYMEYLADPATY
TMDEVLDELGLTREDIA
>orf00371
(SEQ ID NO: 1182)
MFETFEKIKELAKKRGKALGQVEEDLGYGRNTLYKIKNSTPNAERIAEIANYFNVSTDYL
LGRTDNPAIAGSDEFAQVNGQIIDLRKAAANTMLFDGKPLNEDDIDFITSVLSAHFKSKG
ER
>orf00372
(SEQ ID NO: 1183)
MVSILKNLEQEKDHLEKVIKVVSAGGKFLRLPYQKSHARLVRI
>orf00373
(SEQ ID NO: 1184)
MPDIANGRERVIAFLKEKGIKKATLAVAYGFKRQEVTNILSGTTKGPRANSFILQVIEDY
GIE
>orf00374
(SEQ ID NO: 1185)
MRPKRYPYSGQKESTFVKADPELVEKLLRNTSFLECLQKKPINFQIDSEEFKRLSYEAIH
DTSQVTQ
>orf00377
(SEQ ID NO: 1186)
LKNREEEWQGIIAKNAILLIIAPFYFLIIVKNGVLSKIKTVTEITAYQL
>orf00378
(SEQ ID NO: 1187)
MREVIQELLDSSMSTSAISQGAGVPWTTVSDLRKGKTSMDKMALLTAEKLYEFATTDKQ
>orf00382
(SEQ ID NO: 1188)
VEEVEVAEVKNARVSLTGEKTKPMKLAEVTSINVNRTKTEMEEFNRVLGGGVVPGSLVLI
GGDPGIGKSTLLLQVSTQLSQVGTVLYVSGEESAQQIKLRAERLGDIDSEFYLYAETNMQ
SVRAEVERIQPDFLIIDSIQTIMSPEISGVQGSVSQVREVTAELMQLAKTNNIAIFIVGH
VTKEGTLAGPRMLEHMVDTVLYFEGERHHTFRILRAVKNRFGSTNEIGIFEMQSGGLVEV
LNPSQVFLEERLDGATGSSIVVTMEGTRPILAEVQALVTPTMEGNAKRTTTGLDFNRASL
IMAVLEKRAGLLLQNQDAYLKSAGGVKLDEPAIDLAVAVAIASSYKDKPTNPQECFVGEL
GLTGEIRRVNRIEQRINEAAKLGFTKIYVPQNSLTGITLPKEIQVIGVTTIQEVLKKVFA
>orf00389
(SEQ ID NO: 1189)
VNIATLQNGHILGWQIQHIANKLTSNFWIAKDFLSYQVIGWANARMTYSHISSLFIISQF
>orf00391
(SEQ ID NO: 1190)
VSITFSLTNFFKILINLTAQVSPQVIDEKILMMDLNLNNYLSTVIQLRQDVYTGIKILHR
VRHGE
>orf00392
(SEQ ID NO: 1191)
MSRYSYSLDSRKIVFEISCFKEKKASLTLFFHLFESSIMKLATQPSFSSFYSELK
>orf00396
(SEQ ID NO: 1192)
MKIKEQTRKLAAGCSKHCFEVVDRTDEVSSKHRFEVADRTDEVSSKHRFEVADRTDEVSN
IYLRQGDVDVV
>orf00408
(SEQ ID NO: 1193)
LSLLDLRGSLCLRIYLHEPLITTVSQDFTSLSDISHF
>orf00411
(SEQ ID NO: 1194)
MDFKSFIIGLVVGIFGPYMDDLIRKKFLKSSEKKTEKSVKK
>orf00434
(SEQ ID NO: 1195)
MFEKIKGINIKSGIFEDETKLELFEGNFEGTNPVQNDRASLLFGRNGSGKSTIARGINQL
KNGEIGTDRVSFIDKNNNNIVLSDTERKSIFVFNEHYVDQKVKIAQEGLDTIVILGEQVD
IDEELDRLRTQLSESQIESQDYYAEYEEYLDEKNEKSPDFWKKEMTDSLKGVGNWAERDR
EIKGNRAASPVHNNTFQNFVDLQPILDKNELEVEFNNKKARYFSIRDSAVTINNELSLPD
INFDSNELSTLLSEKIEEPELNSRDKYLLTLLSDSTKGERHLREVKDFFEDEHQKKCPFC
TQSVSEDVKVELTNGITKLLSRAVEEHQSALRGKKIDEINQDFSGYEQIDPILIQSYQNS
INALNAKFNEINSIIDKKIDNPYNIVELPNISFSQELSQAEHDIEKINQAIIKHNSEISG
IQKLKVDLLQINNELAFYEIQDAYKKFQEKTNKKAICENNYNNSSKRVKDYEKQISDLED
KKLNIDIAVDEINKSLNYIFFSKNRLAIQNQNGNYYLLSRGKSVVPSRVSVGERNALALC
YFFTEIIQQRELADAYSHEYFIVIDDPISSFDMENKVGITSYLKYCLTRFFKGNSNTRVL
LMTHDKQTIYDFDIFLKEIMESCKEEEGGQKSKYKKLELVSGKLQEFKTSTHDYTELLEI
VFGYALGNSTPTSESFVGNAMRKILEAYGSFNYKKGIAELTTDPLIVEKIDKEYRTYFEN
LMYRLVLNGESHFKDPVKTLSIDFFDTISDEERKKTARDLLVLLYLLDDLHVLKHLEGVS
NAENRLEQWKCEILE
>orf00458
(SEQ ID NO: 1196)
MIEGDRDCADIVTQLTAVKSSVERVIEMIITENLTECINQPLDDSEAQKEPLFKAIRYII
KRK
>orf00460
(SEQ ID NO: 1197)
METSISMADFYGKYQNENLELIDVREAHEFQAGHAPGAKNLPLSTLEQGYKELKPDHEYY
VICQGGVRSASTCQFLSSQGLTVTNVEGGMNAWPGQVE
>orf00462
(SEQ ID NO: 1198)
LGGKSCLLEDRLCDIAAQTTVAADDVGLFFVQFISFLLDTLSVFDTIVQN
>orf00466
(SEQ ID NO: 1199)
MKIKDQTRKLAAGCSKHCFEVVDRTDEVSSKHCFEVADRTDEVSNIYTARRR
>orf00467
(SEQ ID NO: 1200)
MKLLSIAISSYNAAAYLHYCVESLVIGGEQVGILIINDGSQDQTQEIAECLASKYPNIVR
AIYQENKGHGGAVNRGLAEASGRYFKVVDSDDWVDPRAYLKILETLQEFESKGQEVDVFV
TNFVYEKEGQSCKKSMSYDSVLPVRQIFGWDQVGNFSKGQYIMMHSLIYRTDLLRASQF
>orf00468
(SEQ ID NO: 1201)
MYYLPVDFYRYLIGREDQSVNEQVMIKCIDQQLKVNRLLVDQLDLSQVSHPKMREYLLNH
IEITTVISSTLLNRSGTAEHLAKKRQLWTYIQQKNPEVFQAIRKTMLSRLTKHSVLPDRK
LSNVVYQITKSVYGFN
>orf00476
(SEQ ID NO: 1202)
MSLQIKLKKLAKELSKLLKDSNLETVDKDVLENSQKELQKAVLFLADEKGSEHTEAEVID
NLKEVIAKLKANA
>orf00483
(SEQ ID NO: 1203)
MKIKEQTRKLAAGCSKHCFEVVDKTDEVSYIYLRQGEADAV
>orf00503
(SEQ ID NO: 1204)
MKIKEQTRKLAAGSSKHCFKVVDGTDEVSSKHCFKVVDGTDEVSSKHCFEVVDRTDEVSN
HIRQGDVDVV
>orf00509
(SEQ ID NO: 1205)
MNDDDSRCIHIERDGKTIEFGYLNISSTDRNTSHADGLVGIFNSNFSGVRVRGIAVFLNG
PDNLDTTLVGNFQTIWNFRIICIHS
>orf00510
(SEQ ID NO: 1206)
LEFNFCRSIIKNGRDNLPNTNSTSGMATRWANHNWSDDIKDRLKTK
>orf00515
(SEQ ID NO: 1207)
MSNVDKIRKIHIIVCWMYIFLSFRAIINDTEYFLLIFLAFIYSIVSLPLYSVKNKIVSIC
LVINSILLMSFPILINKFFPESFLTYIVLISVFITELIIFHLIGKDFDTKLTNEYKKISQ
FRSKVSQSPWIKYLEISSFILTIFPSILYGTVDNHVLTLIFLIKICVDTTIKFLFIRLFD
TSTLMKRRIFFLFALDVIAYLFLGYLLVIQKAGYLFSVLLLFSNFSVPFIKEKEYELFKN
SK
>orf00516
(SEQ ID NO: 1208)
MNKKKMILTSLASVAILGAGFVASSPTVVRAEDAPQVVEKSSLEKKYEEAKTKADTAKKD
YETAKKKAEDAQKKYDEDQKKTEEKAKKEKEAAKKVDDASLAVQKAYVEYRKVQESRSNY
RNRSDYNKKLAEAQVKIDEANKKLTAANNEFKTVRAVVVPEPNALAETKKKAEEAKAEK
>orf00518
(SEQ ID NO: 1209)
LEQEVATAQHQVDNLKKLLAGVDPDDTEAIEAKLKKGEAELNAKQAELAKKQTGLEKLLD
SLDPEGKTQDELDKEAAEAELNKKVESLQNKVADLEKEISNLEILLGGADSEDDTAALQN
KLAAKKAELAKKQTELEKLLDSLDPEGKTQDELDKEAAEAELDKKADELQNKVADLEKEI
SNLEILLGGADPEDDTAALQNKLATTKAELEKTQKELDAALNELGPDGDEEETPAPAPQP
EQPAPAPAPKPEQPAPAPKPEKSADQQAEEDYARRSEEEYNRLTQQQPPKAEKPAPAPAP
KPEQPAPAPKTGWKQENGMWYFYNTDGSMATGWLQNNGSWYYLNSNGAMATGWAKVNGSW
YYLNANGSMATGWVKDGDTWYYLEASGAMKASQWFKVSDKWYYVNSNGAMATGWLQYNGS
WYYLNANGAMATGWAKVNGSWYYLNANGSMATGWVKDGDTWYYLEASGAMKASQWFKVSD
KWYYVNGLGALAVNTTVDGYEVNANGEWV
>orf00519
(SEQ ID NO: 1210)
LTISFKKQFLSSSLSSLTKRVIMNTAQATFNREAHTTFNRE
>orf00525
(SEQ ID NO: 1211)
MKIKEQTRKLAVGCSKHCFEVVDRTDEVSSKHRFEVVDRTDEVSNIYTARRS
>orf00539
(SEQ ID NO: 1212)
LKKRMNRWQFLLNQSKEMVGILLLKMKEQELIEFVVNL
>orf00540
(SEQ ID NO: 1213)
LIKVIKRKAFGFRNFNNFKKRILMTLNIKKESTNFVLSRL
>orf00544
(SEQ ID NO: 1214)
MTYNEKRLTNSLERVHMEQLKNTTDLLGLKDKNIKILSVLKYQTHLVVQAKLDSPAPPCP
HCQGKMIKYDFQKASKIPLLDCQGLPTVLHLKKRRFQCKNCLKVVVSQTSIVKKNCQISN
MVRQKIAQLLLEKQSMTEIAHRLAVSTSTVIRKLREFKFETDWTKLPKVMSWDEYSFKKS
KMSFIAQDFESKSILAILDGRTHAVIRNHFQRYQREVRELVEVITMDMYSPYYRLAKQLF
PKAHIVLDRFHIVQHLSRAMNRVRIQIMNQFDRKSLEYRALKRFWNPRFFVSRLGLNQST
GLIYYTRIASSSVRNDSISPRFECT
>orf00545
(SEQ ID NO: 1215)
MGYSLKKSCTYCEQDPEKVNRFLKELNHLSYLTPIYIYETGVETYFYLEYDRALSRQLVS
LEEDIII
>orf00552
(SEQ ID NO: 1216)
MNIAVIGLGHVGLAYALLFASKYKVVAYDIDSVKINNLKKGILPSKNEELMKFFCENNLN
ITFFDTFSEIKNNIDYYIIALPTDYDEKIGSFNTYEIEQTVSKILRVKPNGKIILKSTVP
FGFSNKLKRLFDTKNIIFVPEFLREGCSIYDNLYPSRIVVGDETVEGRKIAELFLSISTH
STANIKNVMLVSPTEAEAIKLFSNTFLALRVAFFNELDSFAERRSLNAEVVIKGVCLDPR
IGNFYNNLSFGFGGYCLPKDTKQLKKEFIEINAPVIEAIDISNTNRKQFIVKQILERKPK
IVGIYKLGMKYNSDNYKESAILSIINELLIVGIKILVYEPNLNVSIDNVIFEKNFELFTK
QSDLIVANRWDRGLEAYKDKVYTRGIWIRD
>orf00554
(SEQ ID NO: 1217)
MLNLQFAETMELTEAELEIVYGGEFGNNAVIPAGAWGGFGTPWSITNFWKKNFNDRPDFD
SDRRRY
>orf00599
(SEQ ID NO: 1218)
MGLDVGSKTVGVAISDPLGFTAQGLEIIQINEEQGQFGFDRVKELVDTYKVERFVVGLPK
NMNNTSGPRVEASQAYGAKLEEFFGLPVDYQDERLTTVAAERMLIEQADISRNKRKKVID
KLAAQLILQNYLDRKF
>orf00635
(SEQ ID NO: 1219)
LNPSYSFGKKDQFALEHCFCIKLSIFARAVTLFVSCIN
>orf00656
(SEQ ID NO: 1220)
MITGTAFILIMSLSARKLPYTIRSSVASLQQIAPSIEEAAESLGSSRLNIFAKITTPMML
SDIISGAILSWVTLISELSTSILLYNVKTRTMTVAIYTEVLRGNYGVAAALSTILTVLTV
GSLLLFMKISKSNSITL
>orf00657
(SEQ ID NO: 1221)
MLIGEGYRTFPVLIYTQFISEVGGNSAFAIMAIIIALAIFLIQKHIANRYSFSMNLLHPI
EPKKTTKGKMAAIYATVYGIIFISVLPQIYLIYTSFLKTSGMVFVKGYSPNSYKLAFNRM
GSAIFNTIRIPLIALVLVVLFTTFISYLAVRKRNLFTNLIDSLSMVPYIVPGTVLGIAFI
SLVYLEVDFL
>orf00658
(SEQ ID NO: 1222)
MECKKLNIWTASSFFLFLTYLVFLVYPIVTVLKQALIHEGQFSLANFVTFFSKAYYSETL
VNSFRVSITATVTSLVVGTLLAYLFSMYDFKGKKFLQILIIIASMSAPFVGAYSWILLLG
RNEVITKFLTNALYLPAIDIYGFKGIVLVFTLQLFPLVFLYVAGTMNSIDNSLLEAAESM
GSFGFKPIVTVVLPLLVPTLLAAPCLYL
>orf00660
(SEQ ID NO: 1223)
LLSTTEFIGLSIRILSNLHEFKILVGLLNQFFFWNLLLHKTKSNVVSDSQMWENSVVLEN
QPDIAFAGFHIIDFCIIEVKFSIFDTVETCNHTKKGRFPTS
>orf00679
(SEQ ID NO: 1224)
MITIKKQEIVKLEDVLHLYQAVGWTNYTHQPEMLEQALSHSLVIYLALDGDAVVGLIRLV
GDGFSSVLVQDLIVLPIYQRQGIGSALMKEALEDYKDAYQVQLVTEETERTLGFYRSMGF
EILSTYNCIGMTWMNRKK
>orf00710
(SEQ ID NO: 1225)
VLKIRYHEQFKKDFKLAMKRGLNAELLEEVLKIWFKKKNFLLDIVIIN
>orf00714
(SEQ ID NO: 1226)
MLGSMFVGLLVGFLAGTLTNRGEHMGCFGKMFLGWIGAFIGHLLFGTWGPIIAGTAIIPA
VLGSMIVLAIFWRRGS
>orf00741
(SEQ ID NO: 1227)
MIDDIPKRVNDVIGQAGNNAKTSRPHVGIGKSHISVPFLFPYHTANRIKNQEKVIF
>orf00755
(SEQ ID NO: 1228)
VAIDKIAGITSEKDSRAHQIFRISPTCSRCFCNDELVKWVARTIFLQLTKRCCLRSGNIT
RSNSVTLDIGSTVFRRNVAGQHFQAPFSSSISANCFTSQFAHHRTNIDNLSMPFLYHRRN
NCL
>orf00756
(SEQ ID NO: 1229)
LFDLLDHGLDTVLVCHVTDISMGFDANFTISFNPFIDQILIDIVKDNSSAGFSVGFGNSK
SNSIRSAGDESNFSF
>orf00768
(SEQ ID NO: 1230)
MKSLARLLIIHVFISIFLFFALISGAVSHTVLLLLLLFLPALNKGLEKIQSNRIPVLNAA
LFFLLISFPQLLTNPVQWKFSIFLVVTIISSLAYFYNFYQVVKEVDQKQLI
>orf00769
(SEQ ID NO: 1231)
LEAASEIETEFQSWIVLVVFNHIDGLSRDTDILGELELGNAQFLAKFFHTIHLVSFLICV
VYI
>orf00774
(SEQ ID NO: 1232)
MKWTKRVIRYATKNRKSPAENRRRVGKSLSLLSVFVFAIFLVNFAVIIGTGTRFGTDLAK
EAKKVHQTTRTVPAKRGTIYDRNGVPIAEDATSYNVYAVIDENYKSATGKILYVEKTQFN
KVAEVFHKYLDMEESYVREQLSQPNLKQVSFGSKGNGITYANMMSIKKELETAEVKGIDF
TTSPNRSYPNGQFASSFIGLAQLHENEDGSKSLLGTSGMESSLNSILAGTDGIITYEKDR
VGNIVPGTELVSQQTVDGKDVYTTLSSPLQSFMETQMDAFLEKVKGKYMTATLVSAKTGE
ILATTQRPTFNADTKEGITEDFVWRDILYQSNYEPGSAMKVMTLASSIDNNTFPSGEYFN
SSEFKIADATTRDWDVNDGLTTGGMMTFLQGFAHSSNVGMSLLEQKMGDATWLDYLKRFK
FGVPTRFGLTDEYAGQLPADNIVSIAQSSFGQGISVTQTQMLRAFTAIANDGVMLEPKFI
SAIYDTNNQSVRKSQKEIVGNPVSKEAASTTRNHMILVGTDPLYGTMYNHYTGKPIITVP
GQNVAVKSGTAQIADEKNGGYLVGSTNYIFSVVTMNPAENPDFILYVTVQQPEHYSGIQL
GEFATPILERASAMKESLNLQSPAKNLDKVTTESSYAMPSIKDISPGELAEALRRNIVQP
IVVGTGTKIKETSVEEGTNLAPNQQVLLLSDKVEEIPDMYGWKKETAETFAKWLDIELEF
EGSGSVVQKQDVRTNTAIKNIKKIKLTLGD
>orf00776
(SEQ ID NO: 1233)
MVDRTDEVSSKHGFEVVDKEKLMWFEEVFEECKKILVS
>orf00783
(SEQ ID NO: 1234)
MEGVNHVDIIKVSCCSFISQVNWMMKGKIPNREGFKFSVARFDAIDLVVVHIGHTRCQFS
RTGSRSGYDNQVATGFDVVVFAHAFWGNDVIHIRRISFDWIMKIRINSVFLKLVAEGICS
GLASVLCNDNGTNKNP
>orf00784
(SEQ ID NO: 1235)
MFNVASINGNHNLNLLFQFLQELDFVVRFITRKDTSSVEIF
>orf00790
(SEQ ID NO: 1236)
LTNQDLQAGTYLVKDYREIILSQDALEKVATNLKLDMPAKTLASKVQVAVPADTRIVSIS
VKDKQPEEASRIANSLREVAAEKIVAVTRVSDVTTLEEARPATTPSSPNVRRNSLFGFLG
GAVVTVIAVLLIELLDTRVKRPEDVEDVLKIPLLGLVPDFDKIK
>orf00791
(SEQ ID NO: 1237)
MPTLEISQAKLDSVKKAEEYYNALCTNLQLSGDGLKVFSITSVKIGEGKSTISANIAWAF
ARAGYKTLLIDGDIRNSVMLGVFKARNKITGLTEFLSGTTDLSQGLCDTNIENLFVIQAG
SVSPNPTALLQSKNFTTMLETLRKYFDYIIVDTAPVGVVIDAAIITRNCDASILVTEAGE
INRRDIQKAKEQLEHTGKPFLGIVLNKFDTSVDKYGSYGNYGNYGKNKK
>orf00792
(SEQ ID NO: 1238)
MNEKILRSSLAIIQSFLVILLTYLLSAVRETEIVSTTAIALYILHYFVFYISDYGQDFFK
RRYLIELVQTLKYILFFALAIGISNFFLEDRFSISRRGMIYFLTLHALLVYVLNLFIKWY
WKRAYPNFKGSKKILLLTATSRVEKVLDRLIESNEVVGKLVAVSVLDKPDFQHDCLKVVA
EGEIVNFATHEVVDEVFINLPGEKYNIGELVSQFETMGIDVIVNLNAFDRSLARNKQIRE
MAGLNVVTFSTTFYKTSHVIAKRIIDIVGALVGLILCGLVSIVLVPLIRKDGGSAIFAQT
RIGKNGRQFTFYKFRSMCVDAEAKKRELMEQNTMQGGMFKVDDDPRITKIGCFIRKTSLD
ELPQFYNVLKGDMSLVGTRPPTVDEYEHYTPEQKRRLSFKPGITGLWQVSGRSEIKNFDE
VVKLDVAYIDGWTIWKDIEILLKTVKVVFMRDGAK
>orf00793
(SEQ ID NO: 1239)
MKKSVYIIGSKGIPAKYGGFETFVEKLTAFQQDKAIQYYVACMRENSAKSGTTEDVFEHN
GAICYNVDVPNIGPARAIAYDIAAINRAIEIAKENKDEDPIFYILACRIGPFIHGIKKKI
QEIGGTLLVNPDGHEWLRAKWSAPVRRYWKISEGLMVKHADLLVCDSKNIEKYIQEDYKQ
YQPKTTYIAYGTDTTRSVLKSSDEKVRSWFKEKNVSENEYYLVVGRFVPENNYESMIRGF
LASNSKKDFVLITNVEQNKFYNQLLAKTGFDKDPRVKFVGTVYEQELLKYIRENAFAYFH
GHEVGGTNPSLLEALASTKLNLLLDVGFNREVAEDGAIYWKNDNLHEIIETSEQKTQKEI
DEKDILSIKQVTERFSWELIVNEYEKLFLCEK
>orf00794
(SEQ ID NO: 1240)
VTIKINNLFFVCLSFFGIVLSSSQVIVNLGLSSIIQYISYFMLMLCVFLTLIKNTLNVFA
NRIIYFLIISFLFIIGINLQNLPLSRKIYLSFSMLIISSLSTLPIKLINNLSDLRRISYY
LLHSIFLSVFLGLVFKISLVTVAVEGIGFSYGFNGGLTHKNFYAITILVSYILLYVSRKY
DAKHQIDSFVLWLDLFLLLISNTRTVYIILVVFWIIINRNFINNIKKEHRLVVTATTIVI
SLLALTFFFKHIINNSESYSHRVLGVVNFFKYYESDRFHLFFGDAELAFGNTTKGYGHNI
RSVLGWDGTVEMPLLSVMIKNGYVGLVGYIIVLFKFISSIISVKNSTKKNIGLSIFIPLL
LSATVENYIVNISFVFMPVCFCILCSIKNIKLVNNRK
>orf00796
(SEQ ID NO: 1241)
MEKLVSIILPVYNVEQYIKNCLESIQQQTYSNLEVIIVNDGSTDKSVEYCEQICKIDSRF
SITHKENGGLSDARNVGIDKSKGDYLIFVDSDDFVSQDMVSYLVSCMENNEADIAICDPV
HYYSDRQNNDLNIFSPASNVKVYETTEALCEMFYQKSFLVSAWAKIFKRELFDDIRFPVG
KLFEDSAIMYLLFEKCETIAYSDAELYAYVHRDNSITTKKFSDRDLDILEITNTIINHYG
DNLRVYTAAVSYKVSACFRILLNSPSGEKYKKVQKECLSYILQNWRNILFNNNVRLKNKL
ALISITIFNPFVKFIYSKVNRWE
>orf00797
(SEQ ID NO: 1242)
MNKYEERYQENLSKNDFYKLINKSYLSDKELQVQQVKAGIVLPPKAFETKLSNKLGLQKS
LHGKGGVVDSNGNYIELSAQKAVGMRNRVYGPYKINYDNLPIRNEKVIYLNYFIKQWGHF
LLDVVGRLWYPLLQDNDTKLVYTCYAGTETKIEGNYLEFLKLLGIDQSRLIMINCPTQFS
EVIIPESSILPGGYYTKEYKQLFSSVVENIKLDKYDVNAKMIYCSRSKLGIAKSKEFGED
GIEGIFKQNGYTSVYMETMSLEEQIKTLLSAKTIVLTSGSLAHNLLFVNKDIDVFILNKT
YRVNLHQFLINEISDATVRFVDIYRSPLPILYGYGPFLMDLTKPLANFLDDNEFVYEKGT
VLSKKDYFKYYLKWLWSYRFFLFRLNGIKEGNSEFEKSFKIIRRYYKTGR
>orf00798
(SEQ ID NO: 1243)
MSKYKELAKNTGIFALANFSSKILIFLLVPIYTRVLTTTEYGFYDLVYTTIQLFVPILTL
NISEAVMRFLMKDGVSKKSVFSIAVLDIFIGSIAFALLLLVNNLFSLSDLISQYSIYIFV
IFVFYTLNNFLIQFSKGIDKIGVTAISGVISTAVMLAMNVILLVVFDWGLLGFFIANVCG
YVIPCIYIVSRLRLWELFEIKIDKKLQWEMVYYALPLVLNILSWWVNNTSDRYIVTAIVG
IQASAIISVAYKIPQILSTISAIFIQSWQISAIKIQEDKSDTTFVSNMLLYYNALLLIIA
SGIILFVKPISNILFGISFYSAWELVPFLIISSLFNAISGCIGAIMGAKMDTHNIAKSAL
VGMIANIILNIVLTFLMGPQGITISTLIASFLIFYMRKDSVKEINSETYRAIYLSWILLV
VEACLLIYMDFIIGALIAMVINLFLLKDVIKPLYLKIFKRN
>orf00799
(SEQ ID NO: 1244)
MIVLQYFKILARFVFMFLISAVLLPFKIKPNKIVFINFNGKGYGDNPKSICEYLRTTYPD
LDLVWLARDNEGFPDGVRVVKYGTFQAFYEQASSKVWVYNVRAFARILKKRGQIYIQTWH
GASSFKLIEKQADLPINYVLEAKYDARVTDIMISDSRKQTEEFQKYFWYSGEIFEVGMPR
NDALFHYKEDYDKLNNIRKELSIHSDDYVILYAPTFRDDGDASYLDINFERLLQCVEHGI
KKKCKFLIRLHPNHSHLCNNISFNKNIINATFYSDMQELTLLADVLVTDYSSSIFDFMLL
NKPYVRYVNDLEKYAELRGVSDTYYELPDSIIKTAEELYDLLPKKIENFDYDSIKKYRNE
ILCPIFNGTASENVGGRIIQEL
>orf00800
(SEQ ID NO: 1245)
LKNNDLKIGSGAIHQISATLSQNSISGKILYCADPVVDDLYGSIVRSQIEEIGRVKEESC
NYNTIAYAMNIAERAIATDIDCIVGMGGGRVLDVCKYASFISKRPYLSIPTTAANDGIAS
PVAVLKRQDDRPKSLGAAIPSMTLIDIDVIASGPIQNIKAGIGDTISNYTALKDWELAVE
RGKDEMHGFAYLMSQNSLDALMKTKYNSITPDFIEVLVNSLVLSGIAMDFAGSSRPVSGS
EHLFSHALDYYGSTRNLHGIQVALGTVAVLKLIENSVDTVVDYLQRFEVHINPKLLGIDE
ELFIYCMQHATKMRSNRYTYLHEVDLSTDRLKQIYKELISEL
>orf00801
(SEQ ID NO: 1246)
MKALILAAGLGTRLAPITNEVPKSLVPVNGKPILMKQIENLYQNNITDITIIAGYKSSVL
TDAVTEKYPEINIIDNVDFKTTNNMYSAYLGKAAMGDSDFLMMNADVFYDASVIKSLLLH
KAPNAIVTDLGIYIEESMKVVEKNGRLVEISKQISPEETLGASIDVYKFSYEAGARFFEK
CKEFIEDKRELQMWSEVALNAILSEVEFVACPLEGRWLEIDNHEDLVAAEKLFA
>orf00802
(SEQ ID NO: 1247)
MKLTNRVDYFGADISELQNKKLFLFDMDGTIYEEDRLFEGTLELLDYIHNIGGEYIFITN
NSSKSVVDYVEKVNRLGIKAERDNFFTSAQATIVYIKENYPKSKVYCQGTKSLIKELSDA
GIDVTEQVSADIDVVLVGFDTELTSDKIRNTCEILSTKDVPFIATNPDIRCPVSFGFIPD
CGSICDMISKSVDRKPVYIGKPEPTMVDIVRKKLNYSLFETVVIGDRLYTDIMTGINAGV
TSVCVLTGEATVNDIQQDSIKPTYTFKNVKEMWKGIV
>orf00804
(SEQ ID NO: 1248)
MKGIILAGGSGTRLYPLTRAASKQLMPVYDKPMIYYPLSTLMLAGIRDILIISTPQDLPR
FKELLQDGSEFGIKLSYAEQPSPDGLAQAFIIGEEFIGDDSVALILGDNIYHGPGLSTML
QKAAKKEKGATVFGYHVKDPERFGVVEFDENMNAISIEEKPEYPRSNYAVTGLYFYDNDV
VEIAKSIKPSPRGELEITDVNKAYLDRGDLSVELMGRGFAWLDTGTHESLLEASQYIETV
QRMQNVQVANLEEIAYRMGYISREDVLALAQSLKKNEYGQYLLRLIGEA
>orf00806
(SEQ ID NO: 1249)
MTDNFFGKTLAARKVEAIPCMLEFDIPVHGDNRGWFKENFQKEKMLPLGFPESFFAEGKL
QNNVSFSRKNVLRGLHAEPWDKYISVADGGKVLGSWVDLREGETFGNTYQTVIDASKGIF
VPRGVANGFQVLSDTVSYSYLVNDYWALELKPKYAFVNYADPSLGIEWENIAEAEVSEAD
KNHPLLKDVKPLKKEDL
>orf00810
(SEQ ID NO: 1250)
MTEYKNIIVTGGAGFIGSNFVHYVYENFPDVHVTVLDKLTYAGNRANIEEILGNRVELVV
GDIADAELVDKLAAQADAIVHYAAESHNDNSLNDPSPFIHTNFIGTYTLLEAARKYDIRF
HHVSTDEVYGDLPLREDLPGHGEGPGEKFTAETKYNPSSPYSSTKAASDLIVKAWVRSFG
VKATISNCSNNYGPYQHIEKFIPRQITNILSGIKPKLYGEGKNVRDWIHTNDHSSGVWTI
LTKGQIGETYLIGADGEKNNKEVLELILKEMGQAADAYDHVTDRAGHDLRYAIDASKLRD
ELGWKPEFTNFEAGLKATIKWYTDNQEWWKAEKEAVEANYAKTQEIITV
>orf00813
(SEQ ID NO: 1251)
MILITGANGQLGTELRYLLDERNEEYVAVDVAEMDITNEEMVEKVFEEVKPTLVYHCAAY
TAVDAAEDEGKELDFAINVTGTKNVARASEKHGATLVYISTDYVFDGKKPVGQEWEVDDR
PDPQTEYGRTKRMGEELVEKHVSNFYIIRTAWVFGNYGKNFVFTMQNLAKTHKTLTVVND
QYGRPTWTRTLAEFMTYLAENRKEFGYYHLSNDATEDTTWYDFAVEILKDTDVEVKPVDS
SQFPAKAKRPLNSTMSLAKAKATGFVIPTWQDALQEFYKQEVR
>orf00814
(SEQ ID NO: 1252)
LVNCEPLEAYRQLEEAELVGCWAHVRRKFFEATPKQADKSSLGAKGLAYCNQLFSLERDW
EALPADERLQKRQEELQPLMEDFFAWCRRQSVLSGSKLGRAIEYSLKYKETFKTILKDGH
LVLSNNLAERAIKSLVMGRSKRVQWTLLA
>orf00823
(SEQ ID NO: 1253)
MNKGLFEKRCKYSIRKFSLGVASVMIGAAFFGTSPVLADSVQSGSTANLPADLATALATA
KENDGRDFEAPKVGEDQGSPEVTDGPKTEEELLALEKEKPAEEKPKEDKHAAAKPETLKT
VTPEWQTVEKKEQQGTVTIREEKGVRYNQLSSTAQNDNAGKPALFEKKGLTVDANGNATV
DLTFKEDSEKGKSRFGVFLKFKDTNNNVFVGYDKDGWFWEYKSPTTSTWYRGSRVAAPET
GSTNRLSITLKSDGQLNASNNDVNLFDTVTLPAAVNDHLKNEKKILLKAGSYDDERTVVS
VKTDNQEGVKTEDTPAEKETGPEVDDSKVTYDTIQSKVLKAVIDQAFPRVKEYSLNGHTL
PGQVQQFNQVFINNHRITPEVTYKKINETTAEYLMKLRDDAHLINAEMTVRLQVVDNQLH
FDVTKIVNHNQVTPGQKIDDERKLLSSISFLGNALVSVSSDQTGAKFDGATMSNNTHVSG
DDHIDVTNPMKDLAKGYMYGFVSTDKLAAGVWSNSQNSYGGGSNDWTRLTAYKETVGNAN
YVGIHSSEWQWEKAYKGIVFPEYTKELPSAKVVITEDANADKNVDWQDGAIAYRSIMNNP
QGWEKVKDITAYRIAMNFGSQAQNPFLMTLDGIKKINLHTDGLGQGVLLKGYGSEGHDSG
HLNYADIGKRIGGVEDFKTLIEKAKKYGAHLGIHVNASETYPESKYFNEKILRKNPDGSY
SYGWNWLDQGINIDAAYDLAHGRLARWEDLKKKLGDGLDFIYVDVWGNGQSGDNGAWATH
VLAKEINKQGWRFAIEWGHGGEYDSTFHHWAADLTYGGYTNKGINSAITRFIRNHQKDAW
VGDYRSYGGAANYPLLGGYSMKDFEGWQGRSDYNGYVTNLFAHDVMTKYFQHFTVSKWEN
GTPVTMTDNGSTYKWTPEMRVELVDADNNKVVVTRKSNDVNSPQYRERTVTLNGRVIQDG
SAYLTPWNWDANGKKLSTDKEKMYYFNTQAGATTWTLPSDWAKSKVYLYKLTDQGKTEEQ
ELTVKDGKITLDLLANQPYVLYRSKQTNPEMSWSEGMHIYDQGFNSGTLKHWTISGDASK
AEIVKSQGANDMLRIQGNKEKVSLTQKLTGLKPNTKYAVYVGVDNRSNAKASITVNTGEK
EVTTYTNKSLALNYVKAYAHNTRRNNATVDDTSYFQNMYAFFTTGSDVSNVTLTLSREAG
DEATYFDEIRTFENNSSMYGDKHDTGKGTFKQDFENVAQGIFPFVVGGVEGVEDNRTHLS
EKHDPYTQRGWNGKKVDDVIEGNWSLKTNGLVSRRNLVYQTIPQNFRFEAGKTYRVTFEY
EAGSDNTYAFVVGKGEFQSGRRGTQASNLEMHELPNTWTDSKKAKKATFLVTGAETGDTW
VGIYSTGNASNTRGDSGGNANFRGYNDFMMDNLQIEEITLTGKMLTENALKNYLPTVAMT
NYTKESMDALKEAVFNLSQADDDISVEEARAEIAKIEALKNALVQKKTALVADDFESLDA
PAQPDEGLENAFDGNVSSLWHTSWNGGDVGKPATMVLKEATEITGLRYIPRGSGSNGNLR
DVKLVVTDESGKEHTFAATDWPDNNKPKDIDFGKTIKAKKIVLTGTKTYGDGGDKYQSAA
ELIFTRPQVAETPLDLSGYEAALAKAQKLTDKDNQEEVASVQASMKYATDNHLLTERMVE
YFADYLNQLKDSATKSDAPTVEKPEFKLSSLASEQGKTPDYKQEIDRPETPEQILPATGE
SQSDTALFLAGVSLALSALFVVKTKKD
>orf00824
(SEQ ID NO: 1254)
LQIAQESSQDTDGINPPVVEEAMVFDRNDCLNQICGNIISLGIDAAFRTQVSNELIFIVV
DFTRSCCN
>orf00826
(SEQ ID NO: 1255)
MLNLMWMKIFHRNRTFLFCFLGFKVDVISIINARIVRR
>orf00827
(SEQ ID NO: 1256)
VYNSQALRQIVVVGSIDHLFKRHSSICEIFGLRKRWLSFL
>orf00830
(SEQ ID NO: 1257)
MTSIIFSAKDIFEQEFGREVRGYSKVEVDEFLDDVIKDYETYATLVKSLRQEIADLKEEL
TRKPQVSSAPSPSHPDPIDVAASSSMTNFDILKRLNRLEKEVFGKQILDNTDL
>orf00854
(SEQ ID NO: 1258)
LISIKHFFWLPLSKKMIIDIIVNKNPDRFCMIEKVKKTMAENR
>orf00858
(SEQ ID NO: 1259)
VNIDSSEFYISHITDGIFDSFLDSNRYLRNFYSVLKVEIDICCEFFVHVFKINATAE
>orf00859
(SEQ ID NO: 1260)
VNPLYLCSSDSNDFFKYTWGDNDFAKLFFNSHRMTSF
>orf00887
(SEQ ID NO: 1261)
LAQISILHFDFLSIDKHSHTVFNTLRKSLQTTLALSATSKQCFEQLAASFLVCSLIFIEY
KV
>orf00897
(SEQ ID NO: 1262)
MLYVGIDIAKNKHDVTALNVPGKTVLKPLTFSNNKAGFELLDLSLRQLNQDCLIALKLLS
DPNREQFQHDNRQVDLKILARHIHRLKKKQSDWKVQYTRCLDIIFPELDKIVGKHSEYTY
QLLTRYPNPQKRIEAGFDKLIEIKRLTASKIQDILSVAPRSIETTSPAREFEIIEIIKHY
KRLIDKAETCVNDLMAEFNSVITTVIGIGGRLGAVILAEIRNIHAFDNPAQLQAFAGLDS
SIYQSGQIDLAGRMIKRGSPHLRWALIQAAKACARFSPAFKAYLKTKLEQGKHYNVAIIH
LAKKLIRTLFYILKKSCHLTNKK
>orf00900
(SEQ ID NO: 1263)
MDTKSSCLITTGRNDSPSTCLPRVASNNDRFSSEFRIIPDFHCSKKGIHVNMDDFS
>orf00903
(SEQ ID NO: 1264)
MMSIREQDLKDIGAIIKYKNFHSPFDTFKYLKDMGFDTIDLSVLLEGFSYAYGMDWLEKF
FKENQDKLREFY
>orf00909
(SEQ ID NO: 1265)
MIPLYRTDNDITKFFTKIRNGHLAKTAGGLDDKFHEANASTSKAFDRQGVGEVNDIRDSA
GSQELRINDKRKTENILFLEIRVRIFRVPHPNDSFFSSHFLG
>orf00910
(SEQ ID NO: 1266)
VLSQGDKDITILDAGLLKNGKIGPVTKDTNDIKATDNMIENSFVLLNQQNIMLFCNQGAT
EGKTNFSPSDKDNFHNKTYFFMM
>orf00915
(SEQ ID NO: 1267)
MKIKEQTRKLAAGCSKQCFEIVDRTDEVSSKHGFEVVDETDEVSNHTYGKAKLTWFEEIF
EEYKMMGKAGQLVFFDVYRLVRQVS
>orf00942
(SEQ ID NO: 1268)
LVEIVRGGSPRPIKDYLTSEVDGINWIKIGDTEKGEKYINNVKEKIKKSGLNKTRFVKKG
TFLLTNSMSFGRPYILNVDGAIHDGWLAISNYENSLNKDYLFYILSSNVVYSQFLSLISG
AVVKNLNSDKVASILIPLPPLSEQQRIIEAIESALEKVDEYAESYNRLEQLDKEFPDKLK
KSILQYAMQGKLVEQDPNDESVEVLLEKIRAEKQKLFEEGKIKKKDLDISIVSQGDDNSY
YGNIPMNWVVIKIKDIFSMNTGLSYKKGDLSINNKGVRIIRGGNIKPLEFSLLDNDYYID
TQFISSEQVYLKHNQLITPVSTSLEHIGKFARIDKDYDGVVAGGFIFQLTPFESSEIISK
FLLFNLSSPLFYKQLKAITKLSGQALYNIPKTTLSELLIPLAPFEEQELITQKVEKLFEK
VNQLWK
>orf00963
(SEQ ID NO: 1269)
VDRTDEVSSKHCFEVVDTTDEVSSKHCFEVVDRTDEVSNHTHDKPTLTWEEEIFEEYHSP
FHN
>orf00964
(SEQ ID NO: 1270)
LDNIHIVLDSLNAVSGIQDFICDGLAIFCDQITSGCSSCK
>orf00979
(SEQ ID NO: 1271)
MKSTLGIISVGLVITYILQQVMSFSRDYLLTVLSQRLSIDVILSYIRHIFELPMSFFATR
RTGEIISRFTDANSIIDALASTILSLFLDVSILILVGGVLLAQNPNLFLLSLISIPIYMF
IIFSFMKPFEKMNHDVMQSNSMVSSAIIEDINGIETIKSLTSEENRYQNIDSEFVDYLEK
SFKLSKYSILQTSLKQGTKLVLNILILWFGAQLVMSSKISIGQLITFNTLFSYFTTPMEN
IINLQTKLQSAKVANNRLNEVYLVESEFQVQENPVHSHFLMGDIEFDDLSYKYGFGRDTL
TDINLTIKQGDKVSLVGVSGSGKTTLAKMIVNFFEPYKGHISINHQDIKNIDKKVLRRHI
NYLPQQAYIFNGSILENLTLGGNHMISQEDILRACELAEIRQDIERMPMGYQTQLSDGAG
LSGGQKQRIALARALLTKAPVLILDEATSGLDVLTEKKVIDNLMSLTDKTILFVAHRLSI
AERTNRVIVLDQGKIIEVGSHQELMQAQGFYHHLFNK
>orf00981
(SEQ ID NO: 1272)
MTSYKRTFVPQIDARDCGVAALASIAKFYGSDFSLAHLRELAKTNKEGTTALGIVKAADE
MGFETRPVQADKTLFDMSDVPYPFIVHVNKEGKLQHYYVVYQTKKDYLIIGDPDPSVKIT
KMSKERFFYEWTGVAIFLATKPSYQPHKDKKNGLLSKLPSSDFQTKISHCLHCSLKLIGH
YYQYRWFLLSPRNLG
>orf00984
(SEQ ID NO: 1273)
MDTKMMSQFSVMDTEMLACVEGGGCNWGDFAKAGVGGAAVVAALGCAAGGVKYGKILGPW
GAAIGGIGGAVVCGYLAYTATS
>orf00988
(SEQ ID NO: 1274)
MKKKILIIFVLYLIMSIFLYPLRESIWYNLFYTIAYMIAVMIYFSLIKKKEKK
>orf01008
(SEQ ID NO: 1275)
LNCKGNDHPKEFHNPNNRFDKKNSKKTKKNFILSPLA
>orf01009
(SEQ ID NO: 1276)
MKIKEQTRKLAAGCSKQCFEVVDRTDEVSSKHRFEVVDRTDEVSSKHRFEVVDRTDEVSS
KHRFEVVDRTDEVSNIYTAR
>orf01017
(SEQ ID NO: 1277)
MHSQTFQFLLMTDKTSLLHRKHRSFIRNIHSKFLILFDLLCGILSRNDSNHNPIS
>orf01021
(SEQ ID NO: 1278)
MSDVKEEVSSLSEKQLRQIDVEYAELNDSDIIERLAYLEINNNEKRIVISDIEPTKEIMS
VSDQIFEIQKNFQKIKNMFELFISDVSDFLSIKNKLESKELEIEEADVNRFMIHLLSSGK
LFVDFNENQIKQKYSKDSEEFDCIHGFASYQYDTNFAYRFCHSLRNYSQHTDLPINEVKA
VSPDDETVIIDFYIDLDYLLNSNFKWKKLKGELIKLNQETSKIDAIALVKEYFNALTELY
GNYNKLFLKLNHNTLVDIKSKLESLKLKHSRYYISKISKYDLKYNPGNYTMSPLAAFAEI
EEIYIELSKIGLVKIVNKSN
>orf01025
(SEQ ID NO: 1279)
MSKHPHYELLNLIGYGLAKFDKLFIKEFQCFSKSEFYRYVVSLGIAETTGVVKNRMDLFD
PYFDNNRKGWWQKAEVYRFRKDLIDMMFGNEDVHSYAEIVKMLLASEGKKTGITIVEKPI
VRTKFKRLQETGMEAENYFILHFDKEEKFQGGQLTDARLYGDGYDFQVDVQEYSYLAEVK
GIRKSKGRVRLTAKEFEKVKEFQSDFILSLVTNLDDIPKLVLIDNPLKHFEFKKNIIKNE
IIEYRSVEDLY
>orf01027
(SEQ ID NO: 1280)
MFIAEFTAILLNEFPVALDSLVFMGFSMKLIHDLDTHTTHSTAKMLYNMKAIKNDFSIRE
>orf01049
(SEQ ID NO: 1281)
LKHLFCHFNPLWIDEIIRLAYKDQDTKDVKSKVKIGN
>orf01077
(SEQ ID NO: 1282)
LCCNRHIANLDLEFISYHLGQVGFDTRISTGLGIFVTKIGNVLFDTDNQFASFLNVCDTC
ISLDWFGSSKAEKANQ
>orf01095
(SEQ ID NO: 1283)
MKEIAFDAFYQLYQNDQLSLVDVREVDEFAALHLECAHNLPLSQLADSYD
>orf01098
(SEQ ID NO: 1284)
MCLICQRIELIKAGQNPYFVKELETGYVVIGDYQYFKGYTLFLAKDHVTELHHMETSVKL
RFLEEMSLVQEAVAKAFEAEKMNIELLGNGDAHAHWHLFPRRAGDMKSHGLNGRGPVWWV
PWEEMAAEDCQVQSPELEEMIKILSHELEKYLA
>orf01099
(SEQ ID NO: 1285)
MKKRYVILSGLLALTLAACSQEKTKVEENTQKTEQSSQPEGTVGSKSQASSQKKAEVSNK
GSYYSIQGKYDEIILANKRYPLSKDYNPGENPTAKAELLKLIAAMQAEGYPISDQYSGFR
SYETQAKLYQDYVNQDGKEAADRYSARPGYSEHQTGLAFDLIGTDGDLVTEEKAAQWLLD
HAADYGFVVRYLKGKEKETGYMAEEWHLRYVGKEAKEIAASGLSLEEYYGFEGGDYVD
>orf01104
(SEQ ID NO: 1286)
MKTKEQTRKLAAGCSKHCFEVVDRTDEVSNHTHGKATLTWFEEIFKEY
>orf01105
(SEQ ID NO: 1287)
MDFFFMNEVKEQVLFRDNHSEHIFWIEGVSDFMIKVNTALW
>orf01109
(SEQ ID NO: 1288)
VCFLGFQTILANPSKPQRQLPFLIFILDFFNYKHHKFLS
>orf01124
(SEQ ID NO: 1289)
MEELVTLDCLFIDGTKIEANANKYSFVWKKTTEKFSAKLQEQIQVYFQEEITPLLIKYAM
FDKEQKRGYKESAKNLANWHYNDKEDSYTHPDGWYYRFHHTKHQKTQTDFQQEIKVYYAD
EPESAPQEGLYMNERYQNLKAKECQALLSPQGRQIFAQRKIDVEPVFGQIKASLGYKRCN
LRGK
>orf01126
(SEQ ID NO: 1290)
MHIHYNTNQTTLPLEISSFLPQDHLVFTIEKVVNTLEDCHFHAFYHAFDRLSYHLKMLVS
TLLFAYSQGIFSGRKIEKWKS
>orf01129
(SEQ ID NO: 1291)
LRLWVIFVIMKVIKSYDTLNDYYRKLFGEKTFKVPIDAGFDCPNRDGTVAHGGCTFCTVS
GSGDAIVAPDPPIREQFYKEIDFIHRKWPDVQKYLVYFQNFTNTHEKVEVIRERYEQAIN
EPGVVGINIGTRPDCLPDETIEYLAELSECMHVTVELGLQTTYEATSDLINRAHSYEL
>orf01131
(SEQ ID NO: 1292)
VETVKRLRKYPKIEIVSHLINGLPGETHEMMVENVRRCVTDNDIQGIKLHLLHLMTNTRM
QRDYHEGRLQLMSQDEYVRVICDQLEIIPKHIVIHRITGDAPRDMLIGPMWSLNKWEVLN
SIEMEMRRRGSVQGCKAVKQEFENEKTT
>orf01143
(SEQ ID NO: 1293)
VQVCVFTNFCFFHCFSSLANCRLFNLRGICLPCISYQ
>orf01152
(SEQ ID NO: 1294)
VFKKDRFSIRKIKGVVGSVFLGSLLMAPSVVDAATYHYVNKEIISQEAKDLIQTGKPDRN
EVVYGLVYQKDQLPQTGTEASVLTAFGYLSGDILKTLGLDTVLEETSAKPGEVTVVEVET
PQSTTNQEQARTENQVVETEEAPKEEAPKTEESPKEEPKSEIKPTDDTLPKVEEGKEDSA
EPAPVEEVGGEVESKPEEKVAVKPESQPSDKPTEEPKVEQVGEPVEPSEDEQAPTAPVEP
EKQPEAPEEEKAVEETPKPEDKIKGIGTKEPVDKSELNNQIDKASSVSPTDYSTASYNDL
GPVLETAKGVYASEPVKQPEVNSETNKLKTAIDALNVDKTELNNTIADAKTKVKEHYSDR
SWQNLQTGVTEAEKVAANTDAKQSEVNSETASLKTAISRLNTDKVELENQLKIAQGKTET
DFSMESWTVLSTAKNKAQEVKDNGTATQEQINEAEKSLKTALADLSVDKTALGSAIDTAT
KKNKENYTNQTWAELETALTAAKSVNTNESKQSDVNEAAEKLTATMEKLVELSEKPRLTL
SIEKRDIDRKATVTYTLENPANTQIKSITATLKKGEEVVKDFVLTEENLKTNHLTALFEK
LDYYKEYTLSTDMVYNRGNDDETESISEELIQLNLKKLELKDIQTVSLMKFENGQESQVT
HLSDKPTDLSKLYLKVTSSTSKDAVLAVSSIEEEIIENKKIFKIHADTPELVVRKKDGSL
SKGFDYYMERVIPHDGDIYYDFKDLISAMTSNPTGTFILGRDISSRNVKPDGNGKSYIKG
EFKGKLLGTNDNVRHSIFDLEYPLFDTIKSGVVKDIDFKHVNMVFPDSNQGDNVATIARV
IKDKTKIENVNVEGYLEGRDHVAGLVNNLEGNSEIENVSFTGKIKSKGGNSITAGIAGRN
ILSRVKRAYVNADIEVHRSSNSSMLVAVNGINADASGGWGTWGRLTESVAKGTLETKQGG
QAGGASSTVWPYGAIDNVVSYAKVTKGKELFGSDGDLNYDWFMKKISNIFGVQGISSGDS
GSDSKFTRISEEEANQKVASYNITAPNLMSDSSLLVDRLNESWKNTDQFESIQDYQAQNQ
LIYQNLTKFTPYYNKEFIVHEGNALTPEQEILKTKKIKSIVGLKGTEFVVDGSDIDTIML
HFEDGSQKRYKVTSTGKFSITNLPEYQVEDLNVVYTSEHIVHPLDSSLINNLVEELKKVE
LYTESTYQVLGIDKDNANKLNRTKRLFLDESLDAVKTQLPTFVKTMFENEWLHINGESSG
AVAALRQKIMDNKTAILLALTYINRYYDVKFSDYNIKKLMLFKPTFHGEKIDLLDRLIRL
GSSGENRLKGSENAETFKQLFASETKQKDLVTYLDYNRSLLTNYQTTGEWFKETTKDYIQ
FEERPSLVEEIKDAKYRVYDNLTAPYYQGYILPLLTLKNTHLAILSNYSTMTFVSREKRP
NWKNEDFDKWVKYVATAHRNHVDTWYKILPDNIKGKMVKENVTAVWEGLSIPGSEWVDQN
AVDRKGRDYAPAREFFNLVGGPMGGWYAYHGYGAHAGGRNRVNYEVFDVLSEYGISVFTH
ELTHVNDTWIYLGGYGRRENMGPEAYAQGLFQSPVPGQPGWGALGLNMAFERKNDGDLIY
NASPTQFENRKELDSYMKNYNDTLMMVDYLEGDAVISKGKEAITKWFKKVEPKVVSQTAQ
YDTVRQLTAEEKEKLSVSSVDDLVDQGLMSDRAVGNNTYNPADFETSYIAIDYMTGIYGG
GKNSVGSPGALMFKHNTFRMWGYYGFEEGVLGYASNKFKQASRDEGHAGLSDNFIISKIS
KGEFLTMEAFKKGYFKKVVEELKTKGIRPVTINQKTYSTFEELQEGFKQAVERDLKKNQL
DERETRNFKFQVFRQLLQQTDSFKTSIFR
>orf01156
(SEQ ID NO: 1295)
MKSKIVLGASLAIATLSLVSLVEIEGLSPFLIENVSANTHSANKVINHKVSIYLENADEG
KGLTVNFSTDSVSPNLFDEFEKKSGITITTMLVNAKTGEVVEKRLTPSVFLRSNDLTSGT
ISSFIFSEYPDGEYKYVVSKGDFIDPKTQFKHQYRGESPVFRIRNRKYVELGTTDKKLDE
RRDNSVYKDGVVEHKVNLSLTSYQGGNGVTAIFSTDSVNSNLLNSFGEKAKKVLIRSKLI
NVKTGEVIDETFSPKVSLTSKILKSGSTAVFYFIDLTDGEYKYVAYESQQYTDPQTTLTH
QYRGESPIFSIKDGKFSGLVSASKPDENPKPTPKPDEKPKPSAPQQEKTKPTVQSGWVGS
SYYQNGKKVTSKWIFDKKYNSYFYLDASGNYVQNAWVGNYYLKSGGYMAKSEWIYDKNYG
SYYYLTSEGSYARNTWSGNYYLKSNGKMAKSEWVYDSNYKSYYYLTSEGSYARNTWVGNY
YLKSNGKMAVNERTPDGYRVDGSGKWVK
>orf01157
(SEQ ID NO: 1296)
MSACTVCAEKGRTPDLSIVDNVPIVENAKAHENNFFYSSDITYYPIF
>orf01158
(SEQ ID NO: 1297)
MAKYYIILPKDAEIYKTWRGTVNIPIIDATKTTPELSYFKEDHRNYIANENKSGANYIEW
KGTVEEFKEAIKKLTDKKSTTATPKKDEKPTPKPDEKPKPTPTVQSGWVGSSYYQDGKKV
ISKWIFDKKYNSYFYLDASGNYVQNAWVGNYYLKSGGYMAKGEWVYDATYQAWYYLTSDG
SYAYSTWQGNYYLKSDGKMAVNEWVDGGRYYVGADGVWKEGQASTASSSNDSNSEYSAAL
GKAKSYNSLFHMSKKNVCIDN
>orf01179
(SEQ ID NO: 1298)
VSRWDGHSDKGEAPAGKTSYAWIWTKWGEQVAFYCDYD
>orf01193
(SEQ ID NO: 1299)
MKSKKGGELRIAVFGDKKPFGYVDNDGSYQGYDIELGNQLAKDLGVKVKYISVDAANRAE
YLISNKVDITLANFTVTDERKKQVDFALPYMKVSLGVVSPKTGLITDVKQLEGKTLIVTK
GTTAETYFEKNHPEIKLQKYDQYSDSYQALLDGRGDAFSTDNTEVLAWALENKGFEVGIT
SLGDPDTIAAAVQKGNQELLDFINKDIEKLGKENFFHKAYEKTLHPTYGDAAKADDLVVE
GGH
>orf01194
(SEQ ID NO: 1300)
MKLFKPLLTVLALAFALIFITACSSGGNAGSSSGKTTAKARTIDEIKKRR
>orf01231
(SEQ ID NO: 1301)
MYQDEAGFGRISKLGSCWAPIGVGPHVHSHYIREFHYCYGAVDAHTGESFFLIAGGCNTE
WMNAFLEELSQAYPDDYLLLVMDNAIWHKSSTLKIPTNIGFTFIPPYTPEMNPLNKCGKR
FVNVDLRIRPFELWKMS
>orf01233
(SEQ ID NO: 1302)
MVTATTCFLKERVEFELLIFFYISPNRCLITVYSVLNL
>orf01234
(SEQ ID NO: 1303)
MDTPDENGYVADDYRITYLEAHIKAMRDAIYKDGVDLLGYTTWGCIDSVSAGTGEMNKRY
GFIYVDRDNVGNGTLKCSKKKSFYWYMSFIAMV
>orf01255
(SEQ ID NO: 1304)
MFLGMIGNISIILQFFGITIIVKIDNQARAIDFFKHDKSSF
>orf01257
(SEQ ID NO: 1305)
MFSLNFFDDSVFLSIKIAHKGCFQLLDMTNPNFFNKFFLAQASDQLLHFLSWNIEL
>orf01266
(SEQ ID NO: 1306)
MTEPDFWNDNIAAQKTSQELNELKNTYNTFHKMEELQDEVEILLDFLAEDESVHDELVAQ
LAELDKIMTSYEMTLLLSEPYDHNNAILEIHPGSGGTEAQDWGDMLLRMYTRYGNAKGFK
VEVLDYQAGDEAGIKSVTLSFEGPNAYGLLKSEMGVHRLVRISPFDSAKRRHTSFTSVEV
MPELDDTIEVEIREDDIKMDTFRSGGAGGQNVNKVSTGVRLTHIPTGIVVQSTVDRTQYG
NRDRAMKMLQAKLYQMEQDKKAAEVDSLKGEKKEITWGSQIRSYVFTPYTMVKDHRTSFE
VAQVDKVMDGDLDGFIDAYLKWRIS
>orf01267
(SEQ ID NO: 1307)
MLQSNQVQNFHHSSFDITAIFPDYFHSVSNIFIDSFLW
>orf01299
(SEQ ID NO: 1308)
MQVIKRNGEIAEFNPDKIYQAILKAAQTVYVLTDDLRQNLAQVTKKVVLDLQEAKVERAT
ISMIQSMVEHRLLGAGYITIAEHYISYRLQRDLERSGYGDHIAVHLHFEQIR
>orf01305
(SEQ ID NO: 1309)
MKLKLCIIGFFFCLIATIGLVTISDTEIPIPLPIDGAFSIQGKSNLSNNEIYEMVRDLSK
TEKVTIYKPIVQSSGQLKYVNFDDVNNEQLKSAPIVGMYYTLGKMDVDSLKPLTMTGLQT
VYMAYPWYIGGILQFTGTLRILLMGSIYLTLLVVLFVVRTRQIKEGVIRRSLGLPIYDLR
REYGISLIFELIMMALLMISYSSFLGNGFFTYSSKLFFSLLLTNFILFQIIDLITFVLFW
LTIQIEKPIEIIKNKAKNKLIFVVWLAIISIIILVSGVFLQETKSSQSSINIQIQNLVPW
DTVKDWRRIEFLGIESNSTKNREVNDSDGQYLQIVAALKNLDFLYIERSSAYVPDFMKTS
HVIENFSKQLENDGITNPEINKELIYINQTGANLQNKVNGTNYHLLDNKIATIYIPEKWK
ENQKSIENTVVAEQFIGTNYTREQLAVQIIPDGEKIFYFNEDADNNLKMKDILPLANVAD
SKDNIVVVLDTDKMMENNKFSLASNILYKSLFSPEAVKKINEMTVLLNFSMNPVDVYQIV
KLKIQSLEHQILLSQILQKIIYSIVFILIYQYVQLFITLKQNEYVKKIILGLSKTYIAIS
SLKYFMMTITMVILFTFLMTGQIELLYIGAASLLVLMLSIIMSFRKLSESYTKILKGDES
>orf01306
(SEQ ID NO: 1310)
MTIDLLNVSKSFGSKKIFTDLNLIFESGKSYALIGGSGSGKSTLLNIIGRLEKIDSGNVL
VDKQDIWKIKERTFFKNTVGYVFQNYSLIDNKTVYDNLSLITKDKKTITDVLEKVGLSSD
YLHQKIYELSGGQAQRVAIARMLMKPRKIILADEPTGALDGEIGKEIIRLLLNETAEDKY
VIIATHDPAVYNEVDVIIDMKDIGYKV
>orf01307
(SEQ ID NO: 1311)
MKKKIYIALIFVTGVLAIFFFGKQMITKENINKPTVELTIYTLSSSDTEKWNKVRQVETE
EAIYFITVKEVSSSEEVFSNIIANGAATGFGVREEEVKKFNNGLGDTIEDSKHNKLIEIE
FFTFSDDGAGFVVANFDYGKEELNSQKKDIKELYKKIYESFKEKNK
>orf01317
(SEQ ID NO: 1312)
MKIKEQTRKLAAGCSKHSFEVVDETDEVSSKHSFEVVDETDEVSNHT
>orf01324
(SEQ ID NO: 1313)
MELFKTWKKNMVLYGLKSQIGTVYRNNDRTTSFYDVGNFLYLAGELDSRFWEDFVRKYGL
DYKIIISENTNWQDFLHRKVGLNSFTRYSFKDKANFQVEFLNNLVTHLEEGYNIVPIDNH
IYNCFSTEEWSQDLQGDFESYQDFVLKGGFGFVILKNNELIAGISSGLVYRKAVEVEVAT
RPNEQGNGFAKKLGAAMILESLNRDMFPLWDAHNEASKKVAEFLGYELSEPYEAFELEEI
LI
>orf01369
(SEQ ID NO: 1314)
MKVIDQALLEKVIIERSRTSHKGDYGRLLFLGGTYPYGGAIIMAALAAVKSGAGLVTVGT
DRENIPALHSHLPEAMAFSLQDQQLLKEQLEKAEVVLLGPGLRDDAFGEDLVKQVFAGLR
QNQILIVDGGALTILARTSLSFSSSQLILTPHQKEWEKLSGITIEKQKEDATASALTSFP
QGTILVEKGSATRIWQAGQSDYYQLQVGGPYQATGGMGDTLAGMIAGFAGQFKQASLYER
VAVATHLHSAIAQELAQEQYVVLPTEISNCLPKVMKRYV
>orf01376
(SEQ ID NO: 1315)
VLDSKEELKESENDAPKLETPLREEPRLAPQTLPEASEVLENKREESKVEITEPAQADDI
RKVVGELAKDISITKLYMTGHSLGGYLAQIAAVEDYQKYPDFYNHVLRKVTTFSAPKVIT
SRTVWDAKNGF
>orf01404
(SEQ ID NO: 1316)
MGRKPKNRPEERTELEHLQAENEYLRAENAILKKLRELRLKEEKEKEERQKLFKN
>orf01417
(SEQ ID NO: 1317)
VVLSTSAILVACGKTDKEADAPTTFSYVYAVDPASLGYSIATRTSRTDVIGNVIDGLMEN
DKYGNVAPSQKDYDLNSTGWAPSYQDPASYLNIMDPKSGSAMKHLGITKGKDKDVVAKPG
LDKYKKLLEDAVSETTDLEKRYEKYAKAQAWSTDSSLLMPTASSGGSPVVSNVVPFSKPY
SQVGIKGEPYIFKGMKLQKDIVTTKEYNEVFKKWQKEKLESNSKYQKELEKYIK
>orf01421
(SEQ ID NO: 1318)
LNFDFFIFLAHFIPLFTFSILQENPKTSKKKLYIRLL
>orf01428
(SEQ ID NO: 1319)
MRLSMKLIHDLDMHTTHSTAKMLYNMKAIKNDFSIRE
>orf01442
(SEQ ID NO: 1320)
LIRIIRNIYRSGEGNTSVFQSFIDQINSNQFCYGSNFDRLRCILLIENFTSICLNSNRMF
SGNGKILSNSSRSTP
>orf01453
(SEQ ID NO: 1321)
MSNYRRTSKPKTEHIKKGFTVFQKTITTIGSILGLITAGITIMNALDNNNKNTKKEPTTS
QTTTFVKEIQKESPQENTTPNKENNTSQEKTQQEETPKSSVKEEKKEDQKTATQDSTTPA
TSKPATENEKQPNTPTSENNTQ
>orf01457
(SEQ ID NO: 1322)
MNQSYFYLKMKEHKLKVPYTGKERRVRILLPKDYEKDTDRSYPVVYFHDGQNVFNSKESF
IGHSWKIIPAIKRNPDISRMIVVAIDNDGMGRMNEYAAWKFQESPIPEQQFGGKGVEYAE
FVMEVVKPFIKHKTGWFDGMMTTGCSMGAYHALNFFLQHPDVFTKVIALSGVYDARFFVG
DYYNDDAIYQNSPVDYIWNQNDGWFIDRYRQAEIVLCTGLGAWEQDGLPSFYKLKEAFDQ
KQIPAWFAEWGHDVAHDWEWWRKQMPYFLGNLYL
>orf01466
(SEQ ID NO: 1323)
MSSIHTKNSSLKSKSRFNEMFGDPLNNNKKFAVKTGQQCFKFSSGKFLDKHDRVFEGYPA
YGGNGIAWKSRKYLIDNPTIIIGRVGAYCGNVRTTHGKVWISDNAIYIKEFKNSDFNLVF
LLELMKVIDFSKFADFSGQPKITQKPLENQKYILPPLALQNEFADFVALVDKSQFACEIA
IKVWRNSLKFSII
>orf01476
(SEQ ID NO: 1324)
LVYAPFSFNILLDYITFDFKILLFSVFLAINRFHNDFIQFLL
>orf01479
(SEQ ID NO: 1325)
MSEYSGLSFFEVALAEFLDIVSAVYLEDADGIIVNLWGILDK
>orf01490
(SEQ ID NO: 1326)
MEGVAKGRIGRKKNNGIDNRCCHKKRNGRVTWNLFFQKTIDDGDDSTFTRREKYTDKGPK
KDSPPTISREKMINLVRCDINFNQP
>orf01493
(SEQ ID NO: 1327)
VDKTDEVSSKHCFEVVDRTDEVSSKHCFEVVDRTDEVSSKHCFEVVDRTDEVSNRTTVRR
S
>orf01495
(SEQ ID NO: 1328)
MTEFMSDNFPKNLHTQFLINLGIKIQMPIFGEKSPTCRT
>orf01503
(SEQ ID NO: 1329)
VVIGVASATTNIWIIFLSGFTAILAGAFSMAGGEYVSVSTPKDTEEAAVSREKLLLDQDR
ELAKKSLYAAYIQNGEFKTSAQLLTNKIFLKNPLKALVEEKYGIEYEEFTNPWHAAISSF
VAFFLRSLPPMLSVTIFPSDYRIPATVLIVGVALLLTGYTSARLGKAPTKTAMIRNLAIG
LLTMGVTFLLEQLFSI
>orf01535
(SEQ ID NO: 1330)
MSFKNNWIDKEGRVFIYFTVEEIMKRRNISKPTAIKTLDELDIKKGIGLIERVRLGLGKP
NIIYVKDFMSIFQVKENDLQKSKNLTSEVKDFNLRSKENELQEVKNLDSNYIENNKSKYS
KREYSFGENGLGTFQNVFLAAEDI
>orf01543
(SEQ ID NO: 1331)
LLHIRVCKTFDRIPYCMLALFLSKSIGLTILLHKVKTVIFIDDQSNDKTCKICIHISFFR
IKLSQQCQLSFSVYF
>orf01547
(SEQ ID NO: 1332)
MTQEDALIVISHIKVLSIVPNRCLKPLDKTFSLYNWIFLSQKYILLQANFLKISRVQLQ
>orf01552
(SEQ ID NO: 1333)
VTTHDEPVYEKHGVLHYAVANIPGAVARTSTIALTNVTLPYIEALAGKGFAQAISEDEGL
RQGVTTYQGYLTSLPVAQGLNRDYTDINDLV
>orf01553
(SEQ ID NO: 1334)
VFFIDGFIVRCHTVSCFDNATLVNSNVNDTEPGRICLTISSVTNSGAFAPGMRMAPITTS
ASLTLASMLNELDIRV
>orf01555
(SEQ ID NO: 1335)
LSTKTKGDAGSMCTDDTITDDSYFSFGTPGTPPGRTPEPPACLVRK
>orf01556
(SEQ ID NO: 1336)
MLIGIPKEIKNNENRVALTPAGVHSLVSRGHRVLIETNAGLGSGFTDADYQKQGAEIVAT
AGEAWAAELVVKVKEPLNSEYGYLRDDLLLFTYLHMAAAPELADAMLAAKTTGIAYETVR
DNQGQLPLLVPMSEVAGRMAV
>orf01576
(SEQ ID NO: 1337)
MASRNVLSMEPKFLLAGHFKGQFLILKIVSSDIDDGFAIAC
>orf01577
(SEQ ID NO: 1338)
LSSADKTCLNQFFTDFSDFFQSSLVEDGFYTFQIENSGFGFFNQISQVFDSFFEFLIPFK
IALGILVGSQSLIKRNHDRLVGIVVV
>orf01578
(SEQ ID NO: 1339)
VSVFLKFIFNTTNQFTGLLFDAVALSLILIVGVQQIRKICKRLSHLICKRNWTEGSLSQA
WLGFLIEKISESGKFFTNQYPFQFICSIASQTLKEALKIFCC
>orf01579
(SEQ ID NO: 1340)
MVSNLVFIGNCNFHNTVIFHLLNRLNQGPLQILSQNHDKGRRLSWIFKSRLGQLNASKNW
MGRKEQAMALAIAADLQDQLLFKRLIDFLDATIH
>orf01599
(SEQ ID NO: 1341)
LLYNPVEKTRVHIKKGIGKLQYLFTRLFYLIFVSTDYISYGSSSEG
>orf01630
(SEQ ID NO: 1342)
MRSYITLICNLNNNLFCLNSFFLTNLVWSQIFSLLSVFITVYI
>orf01631
(SEQ ID NO: 1343)
LLEITLKSPYQFAHILFQSTIVPHGGHYHFIPESDLSAGELAATYVFNPNDIVRDTGDAY
IVRHGDHYHYIPKSSLNNPPSHSNTEEVGSSSSSVLSNPSLHVHHEEEDGHGFDANRIIS
EDSEGFVIPHGDHNHYIKVQTKGYEAALKNKIPSLQSNYQPGTFDEKAVLAKVDQLLADS
RSIYKDRLS
>orf01664
(SEQ ID NO: 1344)
MARLEPAKIAKIVLGILLYIIDLIKSSFVLPIPKAAKKSLILISFVPSFNDKNIVIRRPR
QITKIMPRFICFLFRIFACIS
>orf01680
(SEQ ID NO: 1345)
MELSAIYHGPESEYAYLYKDKKLHIRIRTKKGDIESINLHYGDPFIFMEEFYQDTKEMVK
ITSGTLFDHWQVEVSVDFARIQYLFELRDTEGQNILYGDKGCVENSLENLHAIGNGFKLP
YLHEIDACKVPDWVSNTVWYQIFPERFANGNALLNPEGTLDWDSSVTPKSDDFFGGDLQG
IIDHMDYLQDLGITGLYLCPIFESTSNHKYNTTDYFEIDRHFGDKETFRELVDQAHHRGM
KVMLDAVFNHIASQSLQWKNVVKNGEQSAYKDWFHIQQFPVTTEKLVNKRDLPYHVFGFE
DYMPKLNTANPEVKNYLLKVATYWIEEFNIDAWRLDVANEIDHQFWKDFRKAVLAKNPDL
YILGEVWHTSQPWLNGDEFHAVMNYPLSDSIKDYFLRGIKKTDQFIDEINGESMYYKQQI
SEVMFNLLDSHDTERILWTANEDVQLVKSALAFLFLQKGTPCIYYGTELALTGGPDPDCR
RCMPWERVSSDNDMLNFMKRLIKIRKYASVIISHGKYSLQEINSDLVALEWKYEGRILKA
IFNQSTEDYLLEKEAVALASNCQELDNQLVISPDGFMIF
>orf01688
(SEQ ID NO: 1346)
MGQEIKLIRKQFRITRQEEKQIKEMMREQKVDSFSEFLRQNLLKKNYQDRIFESWFSLWQ
SQKFEQISRDVYEVLVVARENHQVTQEHVSILLTCVQELIAEVNQVQPLSREFREKYMG
>orf01689
(SEQ ID NO: 1347)
MVYRYRTNLKKVFLTDPELHQLNERIAKSNCQNFSVYARKVLLNPNMSFVTINTDTYDQL
VFELRRIGNNINQIARAINQSHLISQDQLQELSKGVGELIKEVDKEFQV
>orf01690
(SEQ ID NO: 1348)
MVVTKHFATHGKKYRRRLIKYILNPDKIDNLKLVSDFGMSNYLDFPSHTEMVEMYNVNFT
NNDKLYESRNDRQEKHQQTIHAHHLIQSFSPEDNLTPEEINRIGYETMMELTGGRFKFIV
ATHTDKDHVHNHILINAIDRNSDKKLIWNYALERNLRMISDRISKMAGAKIIEKRYSYRG
YKKYRESSHKFELKQRLYFLMQQSK
>orf01691
(SEQ ID NO: 1359)
MMTDRAMTKPIRGRQLSKRDLYDEEFFRTHFAKQEIESRLEFLLNRVNSLEELITKAKEL
NLTIDLKQKNVTFILKENNQKISLGHQKISDKKLYDVKFFQDYFKNNEVIASEGLENLQE
QYHAFQEERDKDKVSTEEIEEAFKTFKKPLRHLRKNEIPFVNLKWNLQRTK
>orf01692
(SEQ ID NO: 1350)
MEEENHNKYKVYIRETSSYFVYNKENMDNNCFIKGRTLIRQLSNDSQKLPYRRPTLKSLQ
EKISEINLMIELSNTNKQYQEIKDELVLEIAEIDMKLEETQEKIATLNKMAEVFINLKSE
DEIGRKLAKYDFDQMNMTESIMLDRLNTDILKLQQELGNEINKYEEIARRLDLFVKIINT
NKFTVLKFHENALLE
>orf01693
(SEQ ID NO: 1351)
MNSKLGITLRKVRKGKQISLCSVADEHLSKSQISRFERGESEISCIRLINILDKLHITLD
EFLVLHNDDYTSSESFANLVQYIRKQYSSQSINNIACLLSDTSDYTLNSFEKTMVKSILH
TMDSNIIPSDEELLHLTDYLFKIEKWGYYEIILLGNCVRTINYNSYFLLTKEMLNNYIYS
SLNKTNKQIVSQLAINCFILSIDKEEFSNCSYLISKIKTLLDNELNFYEQTVFLYATGYY
EFKRQLSSGIETMKQAIQVLDILGEDKLKLHYTSHFDKLVNNK
>orf01694
(SEQ ID NO: 1352)
MSLSYYYEINPSTDILKCIEELLYKEDKCFNNILKNWKDIRRNHNDSFPNFWCYGAPGIL
LARKEIFDKTNIGNNDLSIIKNVLTNVEKIRELNLCHGSVGTISCLDAILKDEENLLIKE
SIDFYFDNVVSQVIKPELSTDLNTMNTFSFMLGVSGVVYEISRKQDDRLLNVLLLELRGH
DD
>orf01695
(SEQ ID NO: 1353)
MMTRKVPNIEQMSQIECGLCCCLSILHFYKSKETLLDLRRDIEKGRDGYSIGDLKQLLNK
RNFDTGSYQVKDVNKISELPLPLIAFWDNQHYVVIYKVKKNKVYIMDPSKGYINYEFKEF
SKHFSNIVLLSFPNENYQSLKSQFPSPWIRVFSSFSKVKGRLILTLLFSIISYLIILSVP
VMTSKFINSALGNTFSFQTSFLILFSLLCLYLISILARSMGILFSNIFFSRDIESFTFKH
LLKLPYSFFELRAKGDILYRISSLSGFRELFTNQVVGGVVDIGTILSVVIYMFLSSKTLS
IIALILSLINFLFLFSTRKIMYDTVNRELQEQSLIYSVETEALNTISSIKISGLEDEIYE
NWSKYLKNVLTKYKKRSIVHILYNSATNVFQLFAPIIILIFGLDNVLNGKILLGEVVAFQ
TMASILFSSEISIFNAYTQYILAAGYLNRVNDIWLENEENVENGLKKCSLEGRIDIKDLS
FSYSKDSAPVIENLNLTIEPGQRIALVGQSGSGKSTLSKILSGLYKIDTGKILFDGVNIN
QIDKKILSQNLGVVPQDSFLLNRSILDNITLKNEVTSQKIEEVCKAVQIYDEIMAMPMKF
NTIISEMGSNISGGQRQRIALARALINNPSIVILDEATSALDTINEERITKYIQSQGCTQ
IIIAHRLSTIKDADIIFVMKGGKIVESGNHKYLMDLGGEYYSLYTKRK
>orf01696
(SEQ ID NO: 1354)
MAIVEIINLTKSFKDIEVIHNTSFYLNKGKVYGFVGPNGAGKTTIIKMILGILKPDSGKI
TIFNQTVEQNSENILSRIGLVLGPSFYGHLDAYKNLKLIANMKGLSLDTERLNEYLSMVG
LKDVKKKKVKNFSMGMKQRLSIAASLLGSPEILIWDEPINGLDPQGVIEIRSLIRFLQEK
KGITFLISSHILSELDKVISDIIIINYGKVEFFGSCHYLLQKYNCRNLEEAYLACLAGGE
YD
>orf01697
(SEQ ID NO: 1355)
MIKLEFLKQKKSILWFVLIFPIILNVLLYIDLTFRYRGYLLVHQNELALSNWQLIFKEQT
IFYFSELFYLVLSLIIYEVFAVEFKNDAWLTVISLPFRNKYTINSKLLITVVYTFTFWLS
DYISLYVIGKAIDNSLEIGLIFFLKTFTIQLISSLMIMLLYFLTLVLIRKISGIIPIGII
MMILTISIYYNDYNFKIYLPFTYLSHAFRVTESQFYMILLSNIIIIVLFYILIRKLNERS
FEMKL
>orf01698
(SEQ ID NO: 1356)
MKLLKNELINSKIFLFIIVDICIQILVILAIKTYILDISALYSELDYNKYWYILHTLIYM
LMIFPIQILYQNLREALIEDNNHGWNIMVINTNNLVKIIYIKVTINIVRCFICYFVYTIF
SLIQLGGMGTDMLLTNIIFPNIMSFLLFLPIAIFMQICCIRFDSILAKALPNILLILIVL
ITFQSDWNIFIPATYYYTEIQSTTNLGIKLLVCIWIMGFEFFLLPKLIKLKEQNLV
>orf01725
(SEQ ID NO: 1357)
MRFSAFKIFSNSVCKRIITKGLGFRALLLYTISKVKLREDILVSQSIVPVEIPQYCRFDS
KKRNGILFNVRIANLKFTFFRLDFLRNKIWYSSSMNDEASKQLTDARFKRLVGVQRTTFE
EMLAVLKTAYQLKHAKGGRKPKLSLEDLLMATLQYVREYRTYEEIAAVFGIHESNLIRRS
>orf01753
(SEQ ID NO: 1358)
MHTKSRTIKSLITQFTAILLYELPLALDSLVFMGFSMKLIHDLNTHTTHSTAKMLHNVKA
IKNDFSIRE
>orf01776
(SEQ ID NO: 1359)
MIKIYFTKFSENHNPFCKIFEIIFTNLIFQSILNKNKKNPLRQGEANVV
>orf01783
(SEQ ID NO: 1360)
MSQVKGLCVLDVDGTLILEEVIDLLGREAGHEAEISQITSRAMRGELVFESSLRKRVSLL
EGLPILVFDNVFNSIHLSLNVPEFISILQKNGILVGLVSGGFTPIVGEISKIPWYCLFHC
QPA
>orf01784
(SEQ ID NO: 1361)
MLKSAELGIAFCSKEMLKKEIPHHVDKRDFLEVLPLIDCLE
>orf01789
(SEQ ID NO: 1362)
MFGNWFFKAFVCSLERLAQDRTMNWFSCIGNKNTVAFVPILIGCFA
>orf01804
(SEQ ID NO: 1362)
MEKYFGEKQERFSFRKLSVGLVSATISSLFFMSVLASSSVDAQETAGVHYKYVADSELSS
EEKKQLVYDIPTYVENDDETYYLVYKLNSQNQLAELPNTGSKNERQALVAGASLAALGIL
IFAVSKKKVKNKTVLHLVLVAGMGNGVLVSVHALENHLLLNYNTDYELTSGEKLPIPKEI
SGYTYIGYIKEGKTTSDFEVSNQEKSAATPTKQQKVDYNVTPNFVDHPSTVQAIQEQTPV
SSTKPTEVQVVEKPFSTELINPRKEEKQSSDSQEQLAEHKNLETKKEEKISPKEKTGVNT
LNPQDEVLSGQLNKPELLYRDETIETKIDFQEEIQENPDLAEGTVRVKQEGALGKKVEIV
RIFSVNNEEVSREIISTSTTAPVSRIVEKGTKKAQVIKEQAETGAEHKEVQSGAIVEPAI
QPELPAAVLTDKGESAVQPELPEAVVSDKGVPEVQPALPEAVMTDKGDPEQVEPLPEYTG
VQAGAIVEPEKVEPEYAGVQAGAIVEPEQVAPLPETTGVQAGAIVEPEKVEAPKEYTGVQ
AGAIVEPEKVEAPKEYTGVQAGAIVEPEKVEPSKEYTGVQAGAIVEPEQIAPLPEYTGVQ
AGAIVEPEKVEALKEYTGKIEQPSAEDTKPNNENTNTPEEMSIQKKSSALINMNFITDSS
KVTGVGSATFIAPNVLLTVAHNFINNSTDNTTGEFRGDKSKNVYEWVTPDGQKGTFTANN
IHFYNKKDYPKGFIYDLAVIKLPETTGREHVELVKNYSKVNLNDKLNVHGYPAGKYTHLK
DATVEMEQEYANNTYGVQYQGGNPGMSGGGIFNANGEVIGVHQNGAQNRSGGLILSPTQL
AWIKSIIAGNEIPPVYDELYRHKDEKKDDAKDEKEVIKKLELRNISSVELYSKDGNKYRH
VTSLASLPSNAENYFMKVKSENFKDVMLPVTSITNDTKDNRDVYKIVASANSLIQHENNN
VLENYTYYLPKTQQSETGVYTSFKNLVDAMNSNPNGTFRLGATMDAREVELETGQESYVN
NVFHGILVGTNNEKYYAIYNLKKPLFGELNGATVEKLSLKDVNISAKDDTATLAKEANNN
THIDNVHADGAIAGERSIGGLVSQVNNSTISNSSYTGRITNTYKTVASYQIGGLVGKLSG
PRGLIDKSFASIDLSSNATQGDQSIGGIVGAVENSALISNSYAEGNLNNVQRFANVGGVV
GNLWDPVGGLEKSGRLSNVLSDVNVTNGNAIAGYNFNGIKANGTYSNKNNKVVNVVQEDD
EILTKDSTVQRGEVLEDAQIKEKKATFVSKNTIKTEDFNFSSRYVTDYKNLENADSSKEK
VYKNIEKLLPFYNRETIVKYGNLVETSSNLYNKELLSVVPMKDKEVISDINKNKSSINKL
LLYYADNTSETLNVNYQTDFSNVAEYRIGGTNLIYTPNTLLRNYQNILDEVLPALNSVEY
KSEAIRKVLDVSKDVSLTELYLEEQFNTTKTNLKDSLTKLLTADAAIAENNNKVIDNYVI
EKIKNNKEALLLGLTYLERWYDFKYRDTKAKDLVMYHLDFFGKSNSSALDNVIELGKSGY
NNLLAKNNVITYNVLLAKNYKTNNLFDALEKYRKAFVPDKTNNEWFKEQTKAYIVEEKST
IKEVSDKQSIAGSPYSIGVYDRLTSPSWKYPSMVLPLLTLPEKSVFIIANISTIGFGAYD
RYRSKEHPAGTDLNDYVEKKAKEAAVRFRDHYDYWYRILDDKNKEKLYRSVLVYDAFRFG
TDEKEDKDTYQATFETNHPAIKHFFGPAGNNVVHNSNGAYATGDAFYYMAYRMLDKDGAV
TYTHEMTHNSDREIYLGGYGRRNGLGPEFYAKGLLQAPDHPNDPTVTINSILKYDQSEES
TRLQVADPTQRFGSVDDLNKYMHNMFDVIYMLEILEGKAVAKLDTNQKYDLLRKIENEYK
PDPDGNSVYATNVVRRLKPEELTKLTTFNSLIEHDIITRRGYVDEATYKRNGYYTINLFS
PIYSALSSKIGTPGDLMGRRIAFELLAAKGYKDGMVPYISNQYEKEAKAQGKVITSYGKQ
IGLVTDEIVLSKVFNNQYNSWIDFKKDMYKEREDKFGKLNKVSFIDPNGSWARQQKVTID
NINRLEKMIEDAVKFDAEDEVAKLYPETNSRVLKLKKAIFKAYLDQTGDFRSSIFENKK
>orf01807
(SEQ ID NO: 1364)
MTALGLLAIGSLIVIITKDNRNKKIATFLIVGATGLVTLSTASALNLNANIHESGRDGVL
QISGYRYVGYLELDDKTVSSVSPASTVSPVEQPKVVTEKGEPEVHEKPDYTQPIGANLVE
PEVHEKLAYTEPVGTTGVDENGNLIEPPVNDIPEYTEPVGTTGVDENGNLIEPPVSDIPE
YTEPISTVSEVASEREELPSLHTDIRTETIPKTTIEESDPSKFIGDDSVRQVGEDGERQI
VTSYEELHGKKISDPVETVTILKEMKPKILVKGTKEKPKEKTAPVLTLDRTNTNVLNRSA
TLSYHLVNTDGVTINKITATIKDGNEIVKTVDLTSEQLDKQVEDLKFYKDYKIETTMTYD
RGKGEETATLEEKPLRLDLKKVEIKNIASTNLVKVNDDGTETPSDFMTEKPSDEDVKKMY
LKITSRDNKVTRLAVDKIEEVTEEGKKLYKITAEAQDLIQHTDPTKVRNKYVHYIEKPVP
KVDDVYYNFKELVDAMNADKNGTFKIGADLNATNVPTPNKQYVPGTFKGHLSSVDGKQYT
IHNIARPLFDRVENGSVKNINLGNVDINMPWADGIAPVANMVKNATVEDVKVTGNVVANN
NIAGIVNKIDSGGQLTNVAFIGNLTGVGDKGQYMAGIAGEIWRGNLAKAYVEADIVANRA
RIGGLVAKTDNGNDSMGIGKYGSIRKSVTKGTIKTKVLFETGGFINSNLPFGKLEDNISM
MRVENGEEFFGSSDLDYDGGYFTNGWLERNFVVKGVSSGKHSYKRSRDKIKEISQDEANK
RIANFGLTADKYEINEPVVNRLNRLTRREDEYKSTQDYKSERDLAYRNIEKLQPFYNKEW
IVNQGNKLAEDSNLAKKEVLSVTGMKDGQFVTDLSDIDKIMVHYADGTKEEMDVTKNTDS
KVQQVREYSVSGLGDVVYTPNMVVKNRDKLIADVKSQLSSVELISQEVRDLMSRRDKPAE
NTDERKNGYIKDLYLEESFAEVKQNLDKLVKSLVENEDHQLNGDEAAIKSLLKKVETNKA
KIMMALTYLNRYYDIKYGDISIKNIMMFKPDFYGKTPSVIDRLINIGSSEKNLKGDRTQD
AYREIIAGNTGKSNLRNFLEYNMRLFTEDKDINDWFIHSAKNVYVSEPKTTNTELKDKRH
RVFDGLDNGVHGRMILPLLTLKDAHMFLISTYNTMAYSSFEKYGKHTEEARNEFKTKIDE
VAHAQQTYLDFWSRLALPNVRDRLLKSQNMVPTPVWDNQTYNGSPVGRRGFDSKGNPIAP
IRELYGPTWRHHDRDWRMGAMASIFPNPNNDDKVLFMVTDMISPFGISAFTHETTHVNDR
MLYFGGHKHRQGTDVEAYAQGMLQTPDSSTTNGEYGALGINMAYHRPNDGNQWYNPDPDK
LKTRDDIDRYMRNYNEAMMLLDHVEADAVLPKIKGDNSKWFKKIDKEMRSKIQYNDLLGP
NQWDSIRDLKDEEKVMTLSSVNDLVDNNFMTKHGNPGNGRYRPEDFTPNSAYVNVNMMAG
IYGGNTSQGAPGSLSFKHNAFRMWGYYGYENGFISYVSNKYKAEADKNNHGLLSDKLIIN
KVSKGNFNTLEEWKRHWYGEVLAKAKKGFEAIDIDGVHISNYDELRPLFDKAVEEDLKKP
DDFSHTVALKSKVFKALLKNTDGFFNKLFKEDI
>orf01818
(SEQ ID NO: 1365)
VFHKSLNNCKRKKVCYSSLLPSCFHDWLKNLLTKSQHFSHINFIVEGEGWRSQVRFNHAL
GNNLTHWCHWNTLDFTIWCYVIRDFFHFFNLSRRFDAIVFDIFRKQGQNILLHDFTTMTG
SLDFLPSNVMFEGNSFCKWRNANHVCVFISFHVFFVDTTVCT
>orf01822
(SEQ ID NO: 1366)
VLGGRANSVTSCTTNSHWNLTFTTKHVTCFSSLVDDIVHGNNREVHEGHIDDWTKSCHGC
SCCCSRDGSFRNRTVTDTFWTKFFKHSNRSTEVSSEDTDIFSHQEHIFIATHFLRHSKDN
GVTEGHCFCFHFISFSLVCVNIFKG
>orf01823
(SEQ ID NO: 1367)
MDMFYIGHFLDIRRDTVTVVNAIENDWQVPDRSHVHCFVENTFIGRTISKEANNDFTGIL
HLLTEGCTDSDPHTTTYDTIGTKVPSIKVSDMHRSTFPFTGSSVFTKDFSHHSVEVNPFS
NSLPVSTVV
>orf01841
(SEQ ID NO: 1368)
MISVWHCNTSSCSTCDLRWVENKAIRFHMALTQRQFVELFQETINVITLTCLTVSVAVVA
CVSICSSWIAYRRYPVCS
>orf01842
(SEQ ID NO: 1369)
MISMRNDISITSILYDIRSIKDITIICSIASLRTCQGNSSIVSWSPSFTILTMFLFLSID
FLFCTDVIRVGSILKVNIVFSIYLDNISTLDLINNILIF
>orf01843
(SEQ ID NO: 1370)
LVCYLDDDLLSIDSFTLANLIRSQILRFLRRLFSIYIGNTIIFLNRSSLIQSQLVRTNT
>orf01859
(SEQ ID NO: 1371)
MDKLIIFIEKGKPFFEKLSRNIYLRAIKDGFISSMPAVLFSSIFILIAAVPNIFGFKWSD
EQLAFILKPYNYSMGILALLVAGTTAKSLTDSVNTRSMEKTNQINYMSTFLAAVVGLLIL
AADPIEGGFANGLLGTRGLLTAFLAAFITVNIYKVCIKNNVTIRLPEEVPPNIAQVFKDV
IPFALSVLSIYGLDLIVRNIFGTNVAESVGKILAPLFSATDGYIGLAIVFGAYAFFWFVG
IHGPSVVEPLIVAISYANIEANVQLVQAGMHADKILNPVTQTFVVTMGGTGATLVVPFMF
MWLCKSKRNRIVGRASVVPTFFGVNEPILFGAPIVLNPIFFIPFVTAPIINVWIMKFFVD
VLQMNSFSIILPWTTPAPIGIVMGTALAPLSFVLAITLIIIDTLIYYPFVKVYDHQILEE
ERKGNSSSELKEKVAANFNTAKADAILEKAGVDAAQNTITEETNVLVLCAGGGTSGLLAN
ALNKAAAEYNVPVKAAAGGYGAHREMLPEFNLVILAPQVASNFEDMKAETDHLGIKLAKT
EGAQYIKLTRDGKGALAFVQEQFD
>orf01861
(SEQ ID NO: 1372)
MIFSNQIPLLLSECNPLTNYNHLFSLIISDKRDIVIHWI
>orf01868
(SEQ ID NO: 1373)
MDGFIVTVKIIGHLLVVVFSAIPFFKEFCKEVCVCLLSIVTFKVFNFRNQFLVFFRWFVF
SMNESFDDITHKQFTSNLTTKADNVSVQLFFSIKGCCHITMQGRTNTWNFIYSVVDTNTS
TTDTYPKISLAASYSFPYFFTKDWVVSPCMVICTKVNDFISF
>orf01871
(SEQ ID NO: 1374)
MLDFQDRSPWLEGQKEIDLSYDLFSTDAVTLDELQSRTIALRSLKHDKGLKVHFAEFPNL
IIWSTLNKGPFITFEPWSGLSTFLEEGDHLEDHKNVCLLEANQVEELGFEIEVL
>orf01872
(SEQ ID NO: 1375)
MKLFKMSCRNIGQAGKILADSGYQGLMKIYPQAQTPRKSSKLKPLTAEDKACNHALSKGE
ARLRTSLPK
>orf01874
(SEQ ID NO: 1376)
MRRKYKSIALKKELANDSGKKKCHAMKAQAIVTSQGRIVSLDIAVNYLL
>orf01878
(SEQ ID NO: 1377)
MKIKEQTRKLAAGYSKHNFEVVDETDEVSNHTYSKATLTWFEEIFEEYKN
>orf01886
(SEQ ID NO: 1378)
LIESQVFSSLQVCCLNLCHLKFQHFDTCLVFLLVFLDFQNLLAHFPIGIKTRLIGFFQVP
KSGITKFIQHLDMQLGTH
>orf01887
(SEQ ID NO: 1379)
MVMLTMNIYKMLPNSSQNRQINHLTIYTADTTTILQDFPTDDNFIT
>orf01888
(SEQ ID NO: 1380)
MTNNICRRTSSQHHIHGINDNRLPCTRFTSQDSHPLFKIEGNSLNNGKVFYRNFK
>orf01899
(SEQ ID NO: 1381)
MPHTRDNWQTREKNSSYHNFFVKGPEILNRTTSTTNNEQIQIVPLISTRNISSNFLRSPF
TLNLGRIKKDVNTWESPADGRDNISNNGSTTAGYYPNSLRKLG
>orf01900
(SEQ ID NO: 1382)
LLEAFLKQAFFCQFFLKLFKLNRKRPNPIRLSFFNDDGVATTWFIDLYTPNHIDLHSFFQ
VKP
>orf01911
(SEQ ID NO: 1383)
MFMSNLCQFFQVWNINQGVTQGFNQDKLGIVFDSCFYFLQIINIDKGCCDTITRKGFFQK
IEGSTVNSRSSHYMVTSMGKRQNRISHCSHT
>orf01912
(SEQ ID NO: 1384)
LINVFSHGVDIAIHSATKFIGGHGTTIGGIIVDSGRFDWMASGKFPQFVDEGSSCHNLSY
TRDVGAVAFIIAVRVQLLRDTGAALSPFNAFLLLQRLETLSLRVERHVQNAETIVDFLVN
HPKVEKVNYPKLADSPYYALAEKYLPKGVGSIFTFHVKGDEEEARKVIDNLEIFSDLANA
ADAKSLVVHPATITHGQLSEKDLEAAGVTPNQIHLSIGLENVEDLIEDLRLALEKI
>orf01913
(SEQ ID NO: 1385)
MTRDFKFETLQLHAGQVVTPATKSRAVPIYQTTSFVFDDT
>orf01917
(SEQ ID NO: 1386)
MSQKNNKKKNKRKNLLTNILAGFLILLSLALIFNTQIRNIFIVWNTNKYQVSQVSKEKLE
ENQDTEGNEDFDSVKAISSEAVLTSQWDAQKLPVIGGIAIPELEMNLPIFKGLDNVNLFY
GAGTMKREQVMGEGNYSLASHHIFGVDNANKMLFSPLDNAKNGMKIYLTDKNKVYTYEIR
EVKRVTPDRVDEVDDRDGVNEITLVTCEDLAATERIIVKGDLKETKDYSQTSDEILTAFN
QPYKQFY
>orf01924
(SEQ ID NO: 1387)
MRWNIGCHPNRDTSCSINQKVWKTRWQDQGFPFIGIIVINEINCIFVDITKHFQSNLAHT
CLGITLSGSTISIHGTKIPMTIYKHVTVAPPLSHTDHGFINRGIPVWVIFTHDIPCNTSR
FFMGFVWGHTQFIHSVENATVNRF
>orf01928
(SEQ ID NO: 1388)
LKKNWFFVDYYDTTIILLALISVILVLLGFAEMIDLDNPPYSIIDLVIWGVFVIDYSWRF
FITKRKWRFILENIFDLLAILPLNAIFTVFRLGRIFRLAKLTKLLKLTRLLRIIGLTGKL
ERKISRFLRTNGLIYILYVNIFIVLVGSSILSVVEEKSFSDSLWWALVTVTTVGYGDIVP
ASIFGKWLAVLLMLVGIGTIGMLTSALTNFFVKDNPDEQIKLDKLQDELSSQRILLEKQS
KKIEELHKMIQDLIEKT
>orf01938
(SEQ ID NO: 1389)
VVDFKQTRQDPHDITIYSWLRQVKSNTGNGSCCVRSNPFQAGNSFIGIWKLATKVSHNLL
GCSLHIANSRIIAQALPSFQ
>orf01943
(SEQ ID NO: 1390)
MAERTVVQVHNAFPEDTTLINSQLIPLVQVVVNQGRKGIVGSCNSMHISSKVEVDVFHWQ
NLCIPTTSSTTLDPHDWTKRRFADSNHGFLANLVQGIRKTNGKRRLSFTCRCWVDGSNQD
QFTDWIALNCTNFIKAEFSLVLSVQLQIVVRNTKFLYNINNWLQLNTLCDFNICFHSKFL
>orf01950
(SEQ ID NO: 1391)
LRILDSQPCFFVDFTNDRLRKSLIIFYMTSRKGITRPAIVFRGAILHHHALSFEVFNQTN
IG
>orf01957
(SEQ ID NO: 1392)
MLFIIGHLNFPTAGSFIDSTLHRLGNRVCIHDDMAFTVTSSTSNSLDESTFVAKETFLVS
IENSYEAHFRNVNSFTEQVNSDQDIKDTQAQVTDNLRPFQGLDIRVHVLDLDTHFLEVVG
QILCHFLGQSCDKGTLIFFNAGIDFTQEVINLSHSRTDFHLWIQESRWTNDLLNHCLGLF
IFIVTRCR
>orf01958
(SEQ ID NO: 1393)
MNVTLKLLPTERTIVQSRRQTETIINQHFFTRTVSIVHALDLPYGHMTLVNHNQEIIWEE
VEKRIRRLSFAPSIHVARIIFNPIGIAHLTQHFDIILCPLFQTLGFKQFTFLFKDS
>orf01959
(SEQ ID NO: 1394)
MIHFSQHLTCQSLNFTNTVNFVSKKFYSKGMFISGSWENLYHIPTNAKSSALEINIITFK
LNIDQVIQEFITRNL
>orf01960
(SEQ ID NO: 1395)
VAKLVNLVIDRTILLNIGIARRDIGLWLVIIIVGYEILNCIFREKFLKLPIELTSQSFIV
GNNQSWFIDFRNDLTHSIGLPCSSRPHQNLSFFSPLNVIHQLLDSLGLIS
>orf01979
(SEQ ID NO: 1396)
MNITKTNFLAVNFVFTIPTTIDMAFYSDFLTCILDKSIMIIQSHNYRSIIKRFTTFCSSK
DDIRHLAPTETLDTRLSQGPSQTFCNIRLSRSIGSNDCRHTLVKDDLGLISKRLESLNFD
FL
>orf01981
(SEQ ID NO: 1397)
MGFIVCNHLKFACFNLRNHDLIDKFLDLGHILVQKKGTKKGFKGITKNGITIAPTRFFFP
LTQLDKLVKLAITRKASQTLLTDNHSTEF
>orf01989
(SEQ ID NO: 1398)
MRITDNQHKIAKEDFVAEYPKLSQALLDRTLDNLSREDNIFIFPNDLTHTPDLDKDQKIF
ETVNQKIKTGNVIGFLGYGQERLTISSRFSDESNDHFLHYLLNKVLHINLTSLDVALSRE
ERLYQLLMYLFPKYLQAAIRKGLYKEYHRFSHNDSHVKGVIDVRNHLKKNLPFTGNIAYT
TREFTYDNPLMQLVRHTIECIKNQKSIGQGVLDNLSTSRENVSEIVRVTPSYKLADRAKI
IRMNKIKLIRHAYFREYRKLQELCLVILSREKHGLGPQAQRVHGILFDVAWLWEEYVYTL
LPKGFVHPRNKDKTDGISVFSVGKRKVYPDFYDRERKIVLDAKYKKLELTEKGINREDLF
QLISYSYILKAEKAGLVFPSKDKVIDNEIGNLAGYGLFESLRMPHSIVHFVK
>orf01995
(SEQ ID NO: 1399)
LDEDILLGCILPWKPEAFEKLKAYGNGREELMTDVRGTSCFVIKFGKAGEQLAAKLWEEG
KMVYASSASMTKRLKLAMSKV
>orf02000
(SEQ ID NO: 1400)
MAKKIVALVGDGIGPEIMEAGLEVLEALAEKTGFDYEIDRRPFGGADIDAAGPPLPDETL
KASREADAILLAAIGSPQYDGAAVRPEQGLMALRKELNLYANIRPVKIFDSLKYLSPLKP
ERISGVDFVVVRELTGEIYFGDHILEERKARDINDYSYEEVERIIRKAFEIARNRRKIVT
SIDKQNVLATSKLWRKVAEEVAQDFPDVTLEHQLVDSAAMLMITNPAKFDVIVTENLFGD
ILSDESSVLSGTLEVMPSASHSENGPSLYEPIHGSAPDIAGQGIANPTSMILSVAMMLRD
SFGRYEDAERIKHAVETSLAAGILTRDIGGQASTKEMTEAIIARL
>orf02004
(SEQ ID NO: 1401)
LANIESHCNFFQSSIFSSLPNTIDSPFNTSCTILDSSKAICHCHSEVIMTVRRTDDLTIR
LDILNQVFEDGTIFL
>orf02011
(SEQ ID NO: 1402)
MTAIWEIATSVEFTKTTKFNDHWTATHFTVKSSWFILNLDFFHFFFSLGNFF
>orf02016
(SEQ ID NO: 1403)
MPRNRFSFTVRVTREKNFISFFSFFFQVIDKRAFSSDINILRFIIIFNIDGHTGFLQITD
MPDTG
>orf02020
(SEQ ID NO: 1404)
MKIKAQTRKLATGCSKHCFEVVDKTDEVSSKYCFEVADGS
>orf02029
(SEQ ID NO: 1405)
VHAHTDKLCNGCNRIFNSIISHHTIFRERNKLSHKAIKSTRQEMGPCHVVFIEFFITLHR
RLIGNHDNFLTNLVGSGRVRNDGST
>orf02030
(SEQ ID NO: 1406)
VNHCHWKLFIQNLGITFSLIVTLIRMTDSHVVGTDKDMILLVNSLFLIFDIDKLRLS
>orf02032
(SEQ ID NO: 1407)
VGNNDILWSKRTISINGFNDFLNTCIAVSTTLCNDDTFLIKRKIFIYKIFCMRNPVSMNT
NYNFFNTWLQDKFFNCMNQNRSIT
>orf02042
(SEQ ID NO: 1408)
LVAPVASSTRFFKNNDSLTSWNNGFIIITINTIISYQRISKGQDLSIIRLVCNGFLVAGH
PCIKDDFACYINICSEGLAFKNCAIF
>orf02044
(SEQ ID NO: 1409)
VVCYFYITIDWSWVHEDCCFFQTIVTFLSQAMLGMVVFF
>orf02045
(SEQ ID NO: 1410)
MAFVLHTEKHHDINLINDFINGYKLSIVCKLLTSPFLRSSEKEFSSQAFQNLHIGFGNA
>orf02046
(SEQ ID NO: 1411)
VIQVTCNSNFKTLKVAKFLINGHQIKQALARVLARTISTIDDGSRNRWTSNQFSIVVDLW
MANHTDIHS
>orf02047
(SEQ ID NO: 1412)
MCPCRILKEEIGNNRMVFIGKLGSIFKLNSSLDQFHYLIDSEVFHGHHMVQCLLIF
>orf02059
(SEQ ID NO: 1413)
MQEHYTPKGKHLTIDNRRLIERWKNENKSNREIAGLLGKAPQTIHTEVKRGTTLQQVRKG
LYKKVYSADYAQTVYQFNRKRSVKKLILTKEIREKILHYHKQKFSPEMMVNKKQVKVGIS
TIYYWFHNGHLGLTKADMLYPRKRKGVKKQASPNFKPAGKSIEERPDVINLRLENGHYEI
DTVLLTKIKNYCLLVLTDRRSRHQIIRLIPNKTAESVNQALTLLLGEHHILSITADNGSE
FKRLSEVFPEEHIYYAHAYSSWERGSNENHNRLIRRWLPKGTKKTTPKEVAFIENWINNY
PKKCLDYKSPSEFLLGG
>orf02076
(SEQ ID NO: 1414)
VQFHLIIFQNLFCSLDIVIDSLTTDTELLGNFSKAVIISVVELDIIHLLICQKRRIKFKE
RIHTIGFFDFHNFYYTKN
>orf02079
(SEQ ID NO: 1415)
MKFNHYFFLFLIIEKQVAIISFFMHFHIIKLVNHFQLLIKLNCISHPNLHIRPSFLSLVL
LFYQKEQDFAIMVI
>orf02085
(SEQ ID NO: 1416)
MKKEQFYPLGIFLAAMLGGLVRYLVSTWLPASPDFPWGTLFVNYLGIFCLIYLVKGYLVY
KGTSKGLILALGTGFCGGLTTFSSLMLDTVKLLDTGRYPSLKPELAFEYRWRPAFSLLFG
EEEMVIVYLAIACGLGALVRYFFSRYNQASKLPLGTLIANLLGCFLIGVFYNHVESKEVY
AILATGFCGGLTTFSTLNDELQRLLSDKKVFYSYLTLTYIGGLVAIFLGILL
>orf02097
(SEQ ID NO: 1417)
LNRSILDNITLKHEVTSQKIEEVCKAVQIYDEIMAMPMKFNTIISEMGSNISGGQRQRIA
LARALINNPSIVILDEATSALDTINEERITKYIQSQGCTQIIVAHRLSTIKDADVIFVMK
GGKIVESGNHKYLITLGGEYYSLYTKRK
>orf02100
(SEQ ID NO: 1418)
MSLLETAKRHQLNSEKYLSYLLECLPNEETLVNKEVLEAYLPWTKVVQEKCK
>orf02101
(SEQ ID NO: 1419)
LKRPPKQADKSSLGAKGLAYCDQLFSLERDWEALPADERLQKRQEHLQPLMEDFFA
>orf02102
(SEQ ID NO: 1420)
VISIEMRTFFLYSSAFKKHSSPSPINDGLYHLLLQSLYNILELIHDIFQSLKGFILKSTF
TNLFPHLFNGVHLWCVWRNKCKANISRNL
>orf02129
(SEQ ID NO: 1421)
METKKIKNLKGQIIVSCQALEGEPLYTPNGGVMPLLAKAAFQAGAKGIRANSVRDISEIK
EEVDLPIIGIIKRDYDGFEPFISATMKEIDELVSEGVDILALDCTNRSRPGYDNITDFIH
DIKVKYPNQLLMADISTFEEGKVAAESGVDFVGTTLSGYTPYSPKKDNPDFELVERLVKE
LDVPVIAEGRISTPEQARKMLDLGAYAVVVGGAITRPKEIAQRFINVIK
>orf02134
(SEQ ID NO: 1422)
MTKDILELESQKMSSDTFIDEIKNNYLSIVESTRKLIDGRQIELAIKLIREANQILMIGV
GSSGNAAREFESSLLRIGIISKTVIDTHFQLMHTALLKDNDLIIAFSLSGSTKEVEETLL
NAKRKNVKIISITNYSSRNIAKLSDCVLLTSKKESYLEGGSLMAKASQLFIIDVICTRLS
LINYEDTICKKEEIASLLSNKVE
>orf02135
(SEQ ID NO: 1423)
MQIKFIDKVSNLIMLNLLYVASVVTVIAIGSGESALIATLIKIVRHEESYPYRDFANSFF
KDYWKNLGAALISNLPILILLFSLFFLPYIPLPIYIISILRHIGVIYIILHLIATTFLIP
LIGRYNNTLKNSLHNSIMLAYKHFFIAVLIRIIEIIPVLLFFILQNQLLVWITLMIFILP
SITKYANAFLYNFIFSKYEKLN
>orf02136
(SEQ ID NO: 1424)
MVSGGFRLDFLLETARLARSTYYYQLKQLDGVDKDKEIKTEIQGIDNEHKGNYGYRRIHL
ELRNRGFVVNHKKVQRLMRILGLTARIRRKRKYSSYQGEIGKKAENLIQRQFEASRPMEK
CYTDVTEFAIPNSTQKLYLSPVLDGFNSEIIAYHLSTSPNLEQVKSMLEQAFTEKYYENT
ILHSDQGWQYQHDSYHRFLESKEIQASMSRKGNSPDNGMMESFFGILKSEMFYGYEKNFR
SLENLEQAIVDYIDYYNNKRIKVKLKGLSSVQYRTKSFG
>orf02137
(SEQ ID NO: 1425)
MKLSYEDKVQIYELRKQGQSFKQLSKRFGVDVSGLKYMVKLIDRYGIEIVKKGKNRHYSS
KLKQEMMDKALLEGCSQRSISLDYALPNQGMLSFWPAQYKKNGYTIVEKTRGRPAKMGRK
RKKTWEEMTELERLQEENERLRTEVAYLKKLKELEERDEALERERQRQLEKWFQEDFD
>orf02152
(SEQ ID NO: 1426)
MVISKTKKYKGVYKDSKGKIYFQIELGVDPITGKRIQKKGRKNQQGLPFNSFKEAYEEIL
RLKHEFVNSTINNSFLTFREFMEEIYLKYYQQKVQFVTYQTALPHHQLFIKQFGSKKLSD
ISTIDCERFRLAIIDKYSSNYAKNMWSRFKACLGYAERLGYIDRVPFKGLDNPRGKHPDT
KFWTFDEFKKIINSFDISEYEGLHNYMTIWLYFMTGLRVSEGIALKWEDIDFERKWIHVH
STIEKDKNGVWYAKQQTKTVAGNRKIDLDDFTITILKKWREVQIKNDDKDYVISRFGAPL
CKSTISRIIKRHAKITGVPEITGKGLRHSHASYLINVLHKDTLYVSYRLGHADKSTTLNT
YSHWYYSGDSTISEEITNSLDNLGLSIYLPNSCQS
>orf02153
(SEQ ID NO: 1427)
METVNYKDLVAIGFPEHTSRNIIRQAKKIAVKKFEEARKNDKNAVQLGCSPFDNKRLGIA
PKNIVENLIGISFSDIEGEKNGYIKDKEI
>orf02154
(SEQ ID NO: 1428)
MLKRIRDLREDDDLTQEYIAKIVLNCTRSSYSKMEAGSRLISINDLIKLADFYKVSLDYL
VGRVDNKEDHYSKK
>orf02155
(SEQ ID NO: 1429)
MVITKHFAIHGKNYRSKLVKYILNPSKTKNLALVSDFGMRNYLDFPSYKELVKMYNDNFL
SNDGLYEFRHDRQEVNQRRIYSHHIIQSFSPDDHLTPEQINRIGYETVKELTGGRFRFIV
ATHVDKGHIHNHIILNSIDQNSDKKFLWNYKSERNLRMVSDRLSKIAGAKIIENRYSHRQ
YEVYRKTNYKYEIKQRVYFLIENSKNFEDFRKKAKALHLIIDFRHKHVTFFMTDSNMKQV
VRDDKLNRKQPYNETYFKQKFVQREIINILEFLLPKMKNMNELIQQAEFFDLKIIPKEKH
VLFEFNGIKLSEQELGKMNQYSVSYFQDYFNNKNETFVLDNNNLIELYNKEKLIKEKELP
TEEVVWKSYQDFKRNRDAVHELEVELNLNQIEAVVDDGIYIKVQFGIRQEGLIFVPNIQI
NMEEEKVKVFLRETSSYYVYHKDSADKNRFMKGKTLIRQFTLQHEPQHMYRRIPLSKIKE
KIEQLDFLISAENSPNDFEDITNDFIAQISYLENMIEQVQNKIDDLTNLEEVLLNNTTNS
SSNLENSIQGKSSVDTIEKDLYIYKGKIETLKEQHGEAINLFEMFNKTIKKYKKKQNMKS
IEENEIHLE
>orf02156
(SEQ ID NO: 1430)
MKRDIRSIRKQFRLTETEEKQILDLMREKGEDNFSDFLRKSLLLSDGQKQMEKWFNLWKK
QKLEQISRDVHEILIIAKINHQVTQEHVSILLTCIQELIKEVEKTSPLSENFRNKYMR
>orf02157
(SEQ ID NO: 1431)
MEYVEAVNQFIERHYKEKDIGHIEIDFWGNKNHPHSLYIYKRSKKIEYDYFFFDSIDYYE
EPDFLEFKYIVHLENITYIFWQED
>orf02162
(SEQ ID NO: 1432)
MTTLDFKTLFKEEYDKLNKQQKKAVDTVEGPVMVIAGPGTGKTQILSRRVANILTNYHTS
SEEIVCLTYTEAGASEMLDRLEKLIGEEGRKVRVSTIHAFCSELILRNSEIFGGQPKIIS
TAAKYEILKEIMDEYVIEGNPLYKNSGKRYSAKDQLLELFYKMKRENLNKEDFEKEIDEY
FKMIDLSIPGDDLYSKFKYARNSKSKDKKVGDYKDKAINELKENTQKLLAGVEIIEKYSS
DISNHNYFDFDDMILWTIEKLEENEGFQRSVSDTIRYLFVDEFQDTSVVQNKLVDLLVKG
KDNPNIFVVGDDDQSIYRFQGVSANNIRDFDKKYKPTKIVLDENYRSSQAIIDASRQLIS
HNPREEKLLIAAGANKDYDYQLPILKSYENAKAEMFGVLTEIKELIDSGVSPNEIGVIYG
RNSYGEEFAKILRDKGIFVQMKENKDLFSEPFFKKIVAILKYLCKPSRDVRELRKIVYFD
FFEVVLSQIVMIRNLKKDEKISIPTIAEIDQKLEIIRKKVNQSSKYLSPMYVLSDVLKSL
SIDEYIMKSKEKYHLVSVLNELYKLMLMECHIHPKLTVKGFLNQLSALEEMGISLPIEDI
SGSPSNCVQLMTAHGSKGLEFDHVFIMKCNDGKKKSEAWPGGENNSGRFSYPPSLNGKDE
NESQLKEEENRRLFYVAMTRAKKVLHLSYANDSTKTHLINEFEEFIDEVDVTESFEDCQS
VDKVVMPKFSNNVINEIFDELSLSVSTLNSFLKCPLSFYFNKGLKLPSETNEAMVFGSII
HEVLEKIYISVDGSQSSELTAKTVLSLEEALKLFETVFEEKSYQLTSNKIKKDDYARGKK
IIENLYKKSGYLKDGVVAVEVPIQGIRLGDILNTTVDLSEVSNIEINGKIDKIECDGNIV
CLVDYKTGNFENAKKKLVAPSEKEPLGGDYWRQAVFYYILFKNAGIDISDKEILVKYVLV
ENSTNEDGFSETEDIRITQKEVDIVLNQIKESIMKIKQGDFNCGCGVLKKDRDNYPCDYC
LQVSANTTPKFDNTEALEVATYQQTRGNYKSLSVSKLNRYLRCPKSIYFEDVLQLSQAAG
LSAGAKEKSTKITINHAPTGPVFGTAIHETMEKIYKEDLQLEDAIEFYDSSLYSHQEEII
DTMSVEELKEYGHNLLTNLFEHFIPNSLKGEHVSLEKELRVKLGDNYSINGIIDKLEFDN
DLIRVVDYKTGSAQRGVEELEVGHDYWRQAVFYNLLLENSSEIDTTDKRIETQYIFLDDN
STESGYSIHTIQVTKEDLDLVTSQIQNFWSHMNTADFTGSCGKNDCDYCRLAEFVDFELL
KETIESGKESNLVN
>orf02163
(SEQ ID NO: 1433)
MSGRLTRQNYYLLGKLIDEFHAVKAAMRVIETKRNDFNI
>orf02164
(SEQ ID NO: 1434)
MKPQERLLTIFFRLQAGERLSKAQLSDEYEIDYRTVQRYMSTLKNFLQEQRISNTEIKFD
TSDNTYRLIAKTTFNKKDILVISKILLENRALNKSELYSLLEDLLSLLSSEEQKEIDAII
GSERFNYKSLTNDKDRIDTIWILSEAIRREQMLEIEYKAPLKDIKSHIIFPVSLYYDAHY
FYLVAYHLKHENYTTYRVDRMESLSESHVKKPEISYGRKYRDGEVRNQKVDAFEGRKIDV
TLIYKGNTEIVLDQFPEREILSENHDEIKVKIKTQDTPGLKRWILGQGDAVTLLSPSKLI
EEIQESLENTLRNYKK
>orf02165
(SEQ ID NO: 1435)
MSVQKTKNTLNEPLKTLLDEYHDKVGKINNSSELFDLYSPWNNFNIEKMIESFNKALQSN
SNNFSWLDIEEDLPKSTDVDIKYGLPNHIKGNIDEATLFLCLVNPNIDEVKTEKKDVGIH
TYYKKAREMESGDDSLNILNDKGKLRIDPKVYIKEHILDVRETSSILYNELQIVKQTRSY
KDTYYLGHYLPHFIKEFLNKKGSFKNVIHNLTDEWDELEKMSKKIANLEAFPFRSQNPNY
TYKSNKRATNFTNLLIESDSKVNLLSARVIIWRIVKHLESSQHKPAFILRRFNTFWLPTI
SKVLEQDLNFTKEEINQIINALDEEYFFTVRKKDYNGQSGYFGRNFCKNNERISNSSFKH
LVQETLGEYVKK
>orf02166
(SEQ ID NO: 1436)
MSGSFSDSPTHDDKFSIENYINGLSNFIIECETPLTVAIQGDWGTGKTSIMYQVEKRLNP
EKQDKKIQTIFFNTWQYSQFDMGNNLAVALITDLISELNVEDSKKKQFFKKAKGALSKGL
EYVNLDFGILNGEKLTEKFQDLIIGFGERTDDIKHLKENLQDIINDAIKENKSDRIVIFI
DDLDRLVPEKAIELLEVLKLFLDCEHCVFVLAIDYNVVVRGAKSKYGKDLDDEKGKAFFE
KIIQVPFTVPVANYDLQNFIESSLKKLDFCFDKNNKERNQLETITQLIRYSIGNNPRSIN
RLFNSVSLLMYINNGDKVDHDEKLMILAMVCFQLRFEEAYNYLLTAYNNSPEDSDDIESY
LIDLLENSFELLDDEVYYNSLVSLLGKFTFKDKKDRDDFTNFYRTLKELLGYNEQGLTME
QFNKLIEKMTFSNAVSIGNTDTITADKKKQNHAPNEDVQFVIRKLFNTLVGDENYFDLKK
PELFGKETREKREAPLSEEFISIPNEFDRIRLTRGKGQGLNIYSSHNKSNFIYISGDTHG
RMLNDGMAIVVNNNLVEKIKDNILASDLRSEELYHEFEMNFRDNLNKLLSKASKILNN
>orf02167
(SEQ ID NO: 1437)
MEFIRAANQFIENYYPREDLDRIESIEIGIRDSENYSRYFLEIQKQSEEFECDFFNFDNI
DYYVVDDSVHFKQIINLENSSYVFWKDY
>orf02168
(SEQ ID NO: 1438)
MNKPIAAIFDIDGTIFRDSLLLKHMEKCVSYDVFPNSVNSEIKFHKNAWENRELDYDDYL
YIAATLYTKYIADKDILDIDFVAKKVIEKESKKLYRYTRDRIKWHKEQGHQIIFISGSPD
FLVSKMAEKLGADIWYASNYLQLDSKYTGEVIPMWDSTSKLQVLKKLFIDFEKSYAYGDT
TGDFTMLQSVGFPTAINPNKKLLDKITMEKLDCKIIIERKDVIYKLDEVTHGIY
>orf02169
(SEQ ID NO: 1439)
MTNAKEFALTAHKNQTRKGKITPYSFHLFLVNNILETLTEDPHIIATGWLHDTVEDTDVS
LEDIKQEFNDEIYSYMSLESEDKSIKDWQTRKELQLAKFREAAEDESLRKVLLVTFSDKL
ANLMELYQDYLIIGGLLWDRFNSKDPKKQRWYFNEFYKIFKDNQDLFSKNKDILNNYKEI
LKLLFYNN
>orf02170
(SEQ ID NO: 1440)
LKAIVKNPKRLFELLRLYFVPVKGRKVVHVPAYAYKEDENEKIYLHNNELHLSKKMFEFL
VNQGLDLVECLPEE
>orf02172
(SEQ ID NO: 1441)
MANSSEAHGRVYIKASNLKTIEDFLLIQEERNKYVYYPTDIIDSQSNISDIVSSRTTQEN
GYYICNMWFTAEGRWCFENNIDDFFDCTLFQDTDDVLIRQMKEYVCSQDIQIKFEYVDAE
ASQNFVKEQEATITYNSKTKDISIDVKTIKDLPYTAENLIVYGYYECDEIVSVQFLLDYY
DDYLRGNEFYLKHKDGIVPILERQQ
>orf02173
(SEQ ID NO: 1442)
MAESALINLINFSKENEELTNLVSGHASKREKATISKDGLIQARSIENFIDNYALSDFDF
STIKEKCVFIKINNSFQADDTTEDIYHNVRGVWNISESRKKDLEYALALYRGVCVGVYKI
QGWKKAYEHSSEYPFPTRKEGGKIETSEETIVKYSNIEDLKKDYPELYKRSFSNSEFPQK
SLDKWRNRSFFYGNWDGSDVPQHLAQCLNKRIINIPKFTKSVKEFKSIDNQASVIYNDLK
>orf02174
(SEQ ID NO: 1443)
MDLVEDCNTFLSFVADKTLEKQKLYKANSCKNRFCPVCAWRKARKDALGLSLMMQYIKQQ
EKKEFIFLTLTTPNVMSDELENEIKRYNNSFRKLIKRKKVGSVIKGYVRKLEITYNKKRD
DYNPHFHVLIAVNKSYFTDKRYYISQQEWLDLWRDVTGISEITQVQVQKIRQNNNKELYE
MAKYSGKDSDYLINQKVFDAFYKSLKGKQVLVYSGLEKEAKKKLKNGDLDYLKEIDPTEY
IYQIFYIWKQKEYLASELYDLTEQEKREINHKMIDEIEEEQ
>orf02175
(SEQ ID NO: 1444)
MNFNKIDLDNWKRKEIFNHYLNQQTTFSITTEIDISVLYRNIKQEGYKFYPAFIFLVTRV
INSNTAFRTGYNSDGELGYWDKLEPLYTIFDGVSKTFSGIWTPVKNDFKEFYDLYLSDVE
KYNGSGKLFPKTPIPENAFSLSIIPWTSFTGFNLNINNNSNYLLPIITAGKFINKGNSIY
LPLSLQVHHSVCDGYHAGLFMNSIQELSDRPNDWLL
>orf02176
(SEQ ID NO: 1445)
MNYQKLNDITGATKNEKDKYYVYGLYEEGKQLPFYIGKGEGTRLISHIDEALTEINQEEN
IQISKKIQIIRKHKGKIIPVII
>orf02177
(SEQ ID NO: 1446)
MTTTKNPWNQLSNVDINGEQAILATEDVELIKKYTSTKHYKNLKDDIYRLQLGFCPQQFV
GDIQNADIIVLSKNPGYTPEFKTLYDHDKNYQKTLLNNLQLKGNLYFHAFDLDTNEFGYW
AKKFKVWFDDVDNLQDLKEKLPWFSKHVALAEYFPYYSTKYDDKLNDFISKEGYFPTQKF
LENLIRERVLDDNDPVIIIITRSYNKWYDAIPQLKEYKNCYETSNPSNPSLKPENLLKVK
RYSAKKEVEKVLEDSLKKLEHK
>orf02181
(SEQ ID NO: 1447)
MFTKLFKKNQDNSDVFKKLIHRLSDMSIQDLKKIDRLLDIIFTPDQGSEQLKTEATYREE
TLDDTLKEAKNQLHMEQLEKNLERFRKNSQ
>orf02183
(SEQ ID NO: 1448)
MTKDWNFNQPLESKSENQEDPDKIAALFGNHQGGNEVNYEAAFQKRKQAPVTESNSSSKP
KVTEVRTGKETDITTSYQQHLKRLIADNNSDIQSSQKKIEELHTLIDTKNKDNKKLQSIY
DAISELH
>orf02185
(SEQ ID NO: 1449)
MTIIERLEEKVTRQESKVARETEKLAAYKEQLETAMFATFKRRQSISHMSFEEALDHAFG
KERQFDDSEFRKDEMSE
>orf02187
(SEQ ID NO: 1450)
MEIEECKKISILDVANRLGISFKQVSSSVYEHPEHDSFRIFSTTNTFKWFSRDIQGDVID
FVRLVKGISFKEALAFLSEEPFQKEAVQEKRERPFYYPLKRIEDSNCSLARYYLTECRGI
SEEIIQKMIQQGLMSQASWKTNETVEPVIVFKSFDHRHKLQAASLQGIYKNHSLPRERLK
TILKGSHGHVGISFDIGKPNRLVFCESFIDLMSYYELHQQNLFDVRLVSMEGLKRSVVAY
QTLRLIAEENQKLEFLDTVIPSKLLPLINTIRDTTSYFDNHPDLLTLAVDCDDAGKDFSD
KLSRSGFPVFLDLPDNESGKEKRDWNDILREKKSDLQLMIENAKETLRNQPVRQTSQCLE
L
>orf02189
(SEQ ID NO: 1451)
MLNKVKTKALISVGAVAATSFILMVGYTIGQHSTAKQSRKEIELAATKLVEDKQAEDKAS
ILSSDTVKEFLTQYYTKEKLGENNTRIQPYMTESAYSQELSSQNDAMNQVYKDYILDYHF
EKADIFVNQTTNQAIAMVSYNVTYVSDLKNANQSKTNQTETRTVKLSYSKLPGKLLVNQV
QVWKSGLDDLDKVTPKTLEESSSIPSLPNTTTK
>orf02190
(SEQ ID NO: 1452)
LKKVKFIQQLSETSCGLACMAMILDYYGHEANLYELCCDFENSRDGLSIREIKDIASYFG
LDSKATEILNIKKFLGNKFVEPYIALTQNAHYIVVEKHNEHSVVFIDPERGRITEDISNF
ANNISGIVIFFSPNRKFTKKKKHSNFFKILKIGKIDIKRLCYISLISILVQSLTLLLPLL
TRFIIDNVISKGEMYRLGMLFSIFSLITFYALFSFIRTKLIITVEKRYIFTLKDKIVGKI
FTLPMKFFDSRSSGEIVTRINNLDSLEKIISSGISSLLIDLSTIIIAFIAMAMISLYFTL
IITCFAIFLFIVLYFLLKKLEEKNSNFISSKELTQGYLMEIFSNLLFLKVSAKGDVSYTK
WKEMFSNELKFDVERENYLNIFQTFISIYRLVPNLLILILGGLEVQQHMMSLGSLMSFLS
LVSLLLSPITLIVQNCFQFQFCFTILDRVFDIIYTPEEKNQFSISKLPPFEMMTFRNLSF
AYSSACKVIYDISLTIKKGERIAIVGRTGCGKTTLIKLLLRLYDVEKNTILYNGNDINLF
DLNSYRKSFGVVLQNDVMFNDTVISNIDLTHSHSMEDVISAASLAELDIEINNMPMGYYT
SIGDNGNNLSGGQRQRLAIARAILQNPEIIIFDEGTGQLDTITEKKIMDNLKHKGITQIF
ITHRLSNAQEYDNIIVMDNGKIIDSGKHDELCGKEGMYKRLFETSYN
>orf02191
(SEQ ID NO: 1453)
MNRKLNITDFKDASYFSERKISSHDLGDGLKSRKRKEYWDNFIGEGSNEFWKYLQEKNDF
SKHDLDIFLEEHTYDVKDIDSFSHMDEFIEFFFKRNDYTLPEFYIVDSEGKRKPIFSNFV
IPFLKFAAYKLEDNLSSQNLKVTRDVLNSLLIALFQQILNISYRTLILELQVLKEQNMLK
GETGEKRFKYFSEIYLSDHFWDILKEYPVMFRLIIENIQNWVTNNVEFLTNLKEDKALLQ
EHFSINGELTKIESGVSDFHNHGKSVYLLWFGTNKLVYKPRDLILDVKFQNLLSWYNLKF
NKNLYVTNILNRGNYGWVEYIEHLPCTYESDFIQFYTHLGYLLFLLFAMRGNDIHFENII
AKGNRPVLVDIETLFHNTTEYRKEYETADKLIFSLLEKSVKRVGILPNIVWGKDGNSGVD
ISGLSSSAGEMIPIERASIMHSMTDEMKIGYEQSALQSKDNQPFIQSGKDVDLNSYKNYV
SAGFKEAYEIISKDPSSIEEFLVEIEKFNNAYSRQIMRPTQFYSNLIQTSYHPSFLRSGL
DREMLFSKVWKIVFEDKKVQRIASSEFESLLLGDIPLFQTKISDRFLCSELTKYQNFFNI
SGMELAIQQIKDFCQKDMEFQLNLIETTLNYDPSYNLVQDSFVPLKPSVKVIRNLNQKEI
QETKSRIVPLTEKIADYLSKISYSGTSGDICWVDMNILGEKTNDWNMVPIGCDLYNGISG
IMLFYLFLYLETKKKDYLIYLKKCYRSLKYYLDSRKQFATHSQVLFGGFSGETPIIYVLL
LLKTRMPEHFNSDELDVYIYDIIDDLKKGYRYDENFDVLVGSAGAIIHLLNVFEVTRDEE
LLILAHDLFSHLEKNSTKITVEGQDGRAWKGTMASNPLAGFAHGVSGIVWALSKLSRYFP
EDKKLKTIIKQGIIFENSMFDTEKSNWSDYRETESGIKYKDIVENIPVSWCHGAPGILIS
RLELYKNNTLNVEFRRTMKSDMDVAIDTTIKYGFGKSHCLCHGDLGNLNILFYVAKKMSS
EHLYNVVYSYLNTILDDLESENWKCGLPYKNSPSLMSGIAGIGLGLLTLNNLSIPSVINL
EIW
>orf02192
(SEQ ID NO: 1454)
MLMLEFTKLRRRKILYMIPFVAILLFLLEFMIGHQIYQGHSYGSVNGWYVENGFFFLNYY
FLLPFASMILVDLIRIEQVSKTISNLRLIPVDLKQLLQAKFMLALLINLLVSEFTFLAML
VLELMDGDFAFSSLAMLSWGVVYGAIAFAYTLSAGIIVLFLGKYRKELILALPLAFLLSF
AGLFALTTVVGRYYLANLLLIIMEQFTALTVSVYAIWLVTLVACLLYLLADKRMMNIIFA
YK
>orf02194
(SEQ ID NO: 1455)
LLDLVKIEFLKQRHQKLNFVVYGVVSLYLALICYYVNDARGLFDSFPFVYKFSLSYLNFL
ILPLYCVSYTIQAFGLEYRYRIMNNLKLASANLMKTFWAKILYIEINALCIMLFTYISVS
LFALLSRFSSTVSLSLLLRFFYLCMSSGILIPMGVFPLVALVMIKVRGKEIVGNLVGVMY
VLVSFFLARTSPNISPVTSANSLIWEGNREGVVLQQPAILSIVVLGLSLLVLSFLSIKSW
LRKVDE
>orf02195
(SEQ ID NO: 1456)
MRNPVIQTFNLSKSYDGKIVLDRIDFTLRQGEIYGLLGRNGTGKTTFIKAILGLTAMDSG
EVNILSEKLLGEFSKDLLSQIGVVLDSASFYPNLTGPENLSIFARLRGISLKQVEQALQV
VGLDGENKKLFKQYSLGMKQRLAIANAIMHQPKILILDEPTNGLDPIGILEMRRYLKELS
TNHGISILISSHIISELEKLVDRVGILHDAHLMAEKTMKELIDGADKRKIHLIVSDAPQA
KEVLCRINLQEQISILSDIELELQGESPTFDIAVVSNSLKDNGIVLKEYSYKNNESLEDY
FKRITGGEGIA
>orf02196
(SEQ ID NO: 1457)
MTILSDKLKAKRKEKGFSQKTLSEGICEQSQISKIERGNYMPAADLLYKLANRLQVPLDY
FFDEQIEMTSNITPFKKLAEKLLEDRNYEDLEYLLNLEKEKSQYLSTEDEFYLLWIQSII
LFYLHSSKDEAIASLENALPKLSVSSSVYLKLLNTLSNFYFSVGRDAEYEENNSLLISLY
QEKDLNHQEYLFGYIRVKHNFAYYLHSKGKELEAVQEALETIDFCKQKETSYQLAPLLTI
VANAGKDFLKHDEILDYYLQARDICKIYEHKLMMAKIDHFLKDKDR
>orf02197
(SEQ ID NO: 1458)
MNDLLLIPVIFLAVGGILILLWRLFLIASGLFLIGFVSFLIFVEVYGIYLLFTETELYTA
DLAQNGLFGFTTFFIIFNLVLLALACWAGYKWKRGY
>orf02199
(SEQ ID NO: 1459)
MEDTYYQLEEALVQGFQTPEEYQAYKELKEHYEEVTGDYSFSKRELTSQLEIALQNHRGV
DFEEYEKKDYLELVQKLEEFDSSLATHYRQLID
>orf02200
(SEQ ID NO: 1460)
MVRRWVLSLQRNGRIIRQGNENKEVDIYHYITKGSFDNYLWATQENKLRYIKQIMTSKEP
IRAAEDIDEQTMTASDFKALATGNPYLKYKMELENDLTLLENQRRAFQRSKDHYRHTISY
CEENMPILEKRLSKYEGDIQQSEISKDQAFSMRVGKQSFDQRAEAGESLHRLIRHNQADS
KEFRTLASYRGFDIKMLSLPTNQPLPETFSVKIVGENQYSVSLDLYSPLGTIQRLQHTID
HIKEDQVKTQNLLDELKDKWNTAKVEIEKNFPKEEDYQTKKAEYDVLAPLIETETDLDTI
DQALRQFHEKGKEKQEQLSFELD
>orf02202
(SEQ ID NO: 1461)
MRNPQNVLNNLTKHSKDKNYQFERLYRLLYNKEMYLVAYQTIYANPGHLTPGVDELTIDG
MSIARIDQLIDSLKDESYQPHPSRRTYIPKKNGKLRPLGIPSFDDKLLQQVIKMILEAIY
EGQFEPSSHGFRPNKSCHTALTQIQKTYTGTKWFIEGDIKSFFDNINHDVMIHILRERIT
DERFLRLIRKFLNAGYVEDWKFYKTYSGTPQGGIISPILANIYLDKFDKYMTDYVKNFCQ
GKYRKRTPEYRQNEIALGKARRALECVSTENQRQEVIQRIRQLEKERVLIPHSDPMDSSF
KRLTYTRYADDFICGVIGSKEDAHRIKADIKDYLEAVLKLELSVEKTLITNARDKAKFLG
YHLYIRQSNLAKRDSAGRLVRNYTGRLVLEVSIETIRDRLLSYGAMKMTYHRGYEVWKPT
ARYFMKDCDDLEILERYNAEIRGFYNYYCIANNSSILHRFKYIMEYSMYKTYATKYRTTK
SHIIRKYKKDGQFSVQYIGRKGDTMTRYLYNGGFKRQKKSFLENDNLPNTAKYFSRTNLI
DRLKASRCEYCQATDSSLEIHHVRKLKDLKGKTFWERLMISRQRKTIALCKDCHKKLHHG
KLD
>orf02208
(SEQ ID NO: 1462)
MEVMKLLAMFRGTIPKDREKMDLFLRYQAQHFDEKWQDLVESFLAEEGKIEEIPHVYSFH
QDIISFLEASSENNDQDLESYTRNFGQAGLSKLSQLSNFEKNLVLEVATYNLSTRFYIQS
EKEKLEPLSELVCLQNQDVNLVNVYRVANNLSDRISRDIEEFLLMVDSKELTKEVLEIHF
EEKEGDVLAYLGSELMATLDTVTDLVHHEENYTQLPLTQKLKIITHFDDVKARSEKSNQV
EEVLSPSSDIEQETEETNSFSNVDKIVEEALREYPIGSQVSYKGQVFQLVSIENAQLNDL
IRLELFNDSNQLFEENPILYLNSLEEIEQVLSLVELEKEDSEIEIDSSSESQEIDLFSYL
EEEKENEKDKETETLIVGIEETDVPVQDFVFPDDLEDFYPKTNREKIETNIAAIELVKRL
EKEGRQANPEEQELLAKYVGWGGLANEFFDELNPKYETERLTLKSLVSKSEYSTMKQSSL
TAYYTDPMIIRQIWQKLLDDGFEGGRILDPSMGTGNFFAAMPRSIRDKSELYGVELDSVT
GAIAKKLHPNTHIEVRGFEEVPYQNNSFDLVLTNVPFGNFRIADKNYDKPYMIHDYFVKH
SLDLVRDGGQVSIISSIGTMDKRTDNVLQEIKTNTHFLGGVRLPDTAFKSIAGTRVTTDI
LFFQKDQAKNLNEEELVFSGSIPFEEDKRVWINPYFDGKYNTQVLGEYEVRNFNGGTLNV
KGVSETLSTDIMKALENVEAPKQIDNFLKAPVFIQEEVDNSLPSRIREDLALYSFGYERN
QIYYRDTHGIRKSSKVDEISYYVDEKGDFKAWDSSLSEHKIDRFVQLHLTDEEALDVYKS
EEASKRGKYKGLFKKTVFYESPLSDKDISRIKGMVDLRETYQSLIEIQRHQDYSRTDFQV
LLSKLNHNYDRFVSQFGYLNASVNRNLFDSDDKYSLLASLEDEYIDSKDQKVKYKKSLAF
EKALVRPERVIARVSTALDALNSSLSDGRGVDLDYMVSIYPEHSQAAILDELGDQILIDP
ESYLRGERKYLSKNQFLSGDILNKIEVVQLLVEENNQEYDWNHALDLLESVRPPRIHLAD
IEFKIGSRWIPQSVYGKFAFECFTNREFELSSPDVEQVIEANPVDGQVHLRTSFAYRYPS
AKDSSLGVSGSRYDTGRKIFENLLNSNQPTITMTVTEGEKKKTITDLEKTSVLRAKEQHL
QELFQDFVSRYPEVQQVIEESYNRLYNRTVSREYDGSHLVIDGLAQNISLRPHQENAIQR
IVEEKRALLAHEVGSGKTLTMLGAGFKLKELGMVHKPLYVVPSSLSAQFGQEIMKFFPTK
KVFVTTKKDFVKARRKQFVSRIITGDYDAIVIGDSQFEKIPVSKERQMNYIEDKLNELRE
IKTHSENKYTVKEAEQSISGLEKQLEELQRFNRDSFIDFENLGIDFLFVDEAHHFKNIRP
ITGLGNVAGITNTTSKKNVDMEMKVRQIQEEHDFKNIVFATGTPVSNSISELYTMMNYIQ
PDILKRYQVDYFDSWVGAFGEIQNSMELAPTGDKYQPKKRFKKFVNLPELMKIYKETADI
QTQDMLDLPVPEAHIIPIESELTENQKLYLEELVMRSDMVKCGTVDPSQDNMLKITGEAR
KLAIDMRLLDSSYSLADNHKLLQVVDNVERIYREGMENKATQMIFSDIGTPKKKDNGFDV
YSEIKALLVDRGIPSKEIAFVHDANSDEKKNSLSRKVNAGEVRILLASTEKGGTGLNVQS
KMKAVHHLDVPWRPSDIQRASVKAV
>orf02209
(SEQ ID NO: 1463)
MEGIYQRDSDQDGLTDAQELALGTNPLSADSDGDGRSDLVEVEEGTNPLEKDLQDIDQTS
ITEPSSVFMEMKQKISDMMESHYKEFIQALISIETGIENEQDLEDLYTYYMRTDSISLLS
SDLETSPQKVEMEIEL
>orf02210
(SEQ ID NO: 1464)
VADTRTKSDSNLGRKGQAVADTRINRLTRWLTDSVNHLFCEENMANSRDYRNPNYTEKIK
LQRFFTQLQIAASFFKEHFVGKIMYYETEIESVELHFSPTNFMHLCGVDYRKGAGSFFDD
CLNRHVIIDELKIKKDGTTMQKLQVLGSIEELLGKHVHLTGSGRYLYLEFDYALRTRKQI
LALTLKETSRKIVPQSLLDLKRKTVFPKGQKVISIYSKHLQTSELFYYLKD
>orf02217
(SEQ ID NO: 1465)
MKDKREIIRARKAFRRSLKDEKKFLKKGKKEVKKQKKDSAVLDEKAWKKEIKKKLEEMRE
ASKARVKQANEDYNHILQNSPPSLLNRKELRDRRLPHARKRLKIAKKQYREAKVEAKEER
KESRKERKTNQKFLYGQESKAKSNFFFQGKSLEELKVKKEVKTAKENLKSTKQAYKSKKV
SRKAKTFLYVLGREGGELASENEDLDGYRTLQETIRKGKRYSRLSYNLGKASVKTGQATC
RFTKKRLTNTKERYHHFKDGKGWKLAKDKPSSFKNRFRKLKKQGLTSVRNIYQKLKAAFS
FFTFAAGNPVTWIVGGIVFLLLLIMSFFLGFSSASLIQQDEFELTKAYTHLTWEDAEHTR
TNDKGITYYTKVDDVMGYMNFKFHDYELHKPVHLFSSETYKDYLSTLWHDLNDGEDLKSM
QDLYETPKYKLSKDDQEEMKELKEEGIYASMQELDNPFEGKSNEDSLTMTYRYGYYDLDG
KPTLQEYILLEAKAHQTIVAPMDGVVSLDGDNVILTNGKGENESRLTLYSIHNGRAIEGT
RVLTGDIIGETPDDTGLKVSYQKYKNKKEKLVYVNPQFYFPKVIQLQTTILPAIGQFGGD
EFERAKHIYEFLKSQGASPQAIAAILGNWSVESSINPKRAEGDYLSPPVGATDSSWDNET
WLAIGGPAIYSGAYPNILHRGLGLGQWTDTADGSTRHTALLNYAHSKNKKWYDLDLQLDF
MLHGDSPYYQSWLKDFFGNTGSAANLAQLFLTYWEGNSGDKLLERQTRATEWYYQIEKGF
SQTNGGQAKSDPQSLEGVRGDLYDHSVPGGGDGMAYAYGQCTWGVAARMNQLGLKLKGRN
GEKISIINTMGNGQDWVATASSLGGETGSTPKAGAIVSFVGGTHGTPAIYGHVAFVEKVY
DDGSFLVSETNYGGNPNYTFRKISQADSAISFAYTTK
>orf02219
(SEQ ID NO: 1466)
MTYKKEEVKGKKEEVLPSTANTISYQALYQNGLMQVKEDYFSQSYLLGDVNYQTVGLEDK
GAIIEKYSDLINSLDDQTNFQLTIFNKRLNLEKFRQSVLYEEKEDGYDTYRKELNRMMNQ
NLDSGENNFSAVKLISFGRKDSNPKQAYRSLSQIGEYFKSGFSEIDARFESLAGEERVNL
LADMLRGEHHLPFSYCDLTRSGQTTRHFIAPNLLDFKNKNYLQINDRLLQIVYVRDYGME
LGDQFIRDLMQGDLELIVSLHAQSSTKADAMKKLRTKKTLMESQKIGEQQKLARTGIYLE
KVGHVLESNIDEAEELLKTMTETGDKLFQTVFLIGVFGQDEEELKQALDTIQQVAGSNDL
MIDKLPYMQEAAFNCLLPFGCDFLEGVSRSLLTSNIAVNSPWTSVDLQDRSGKYYGINQI
SSNIITIDRSLLNTPSGLILGTSGAGKGMATKHEIITTKIKESGENTEIIIVDPEAEYSV
IGRAFGGEMIDIAPDSQTYLNVLDLSEENMDEDPVKVKSEFLLSFIGKLLDRKMDGREKS
IIDRVTRLTYQSFKEPSLEEWVFVLSQQPEEEAQNLALDMELYVEGSLDIFSHKTNIQTG
SNFLIYNVKKLGDELKQIALMVVFDQIWNRVVRNQKLGKKTWIYFDEMQLLLLDKYASDF
FFKLWSRVRKYGASPTGITQNVETLLLDPNGRRIIANSEFMILLKQAKNDREELVQLLGL
SKELEKYLVNPEKGAGLIKAGSVVVPFKNKIPKGTQLFDIMSTDPDKMASN
>orf02220
(SEQ ID NO: 1467)
MNTRVFKDISKYQHRAWLGFTTRQIIFVLPAFIVTIIVLGLNLFFWQFGDWFVYGFVFAF
TIPLMLFGVYKPNDLYFEHYLKYRLHFELTVPLRTITGKKGHEHEKKIKYIKETKSFNDL
>orf02221
(SEQ ID NO: 1468)
MNLSLVSPFVYLASEKISAENLFEGFSVDLQSTVDLIKSLSSYNPTVWTYMSSITKSVMQ
PLGVAILSVVLILEFSKMAKKIANSGGAMTFEALAPMLISYIMVAVVITNTTVIVEAIIG
IASHAIEQVASIVAHGGAKYDTISGLKGSGFIGRMIVGFFALLIWLVRIVSAAMVNLLVS
IRFIQLYLMIPFAPLTIPTFLSDEWKSIGIGYLKNIMVYAVQGVLIFLIVSLVPLFESAG
KIAVSNGAGVLQSLAIMFGSLVQAILLIIALVGSQRTARSILGM
>orf02223
(SEQ ID NO: 1469)
MITHFKGFVYGVDASAMFAQAMSLLQKGLIAVGAFLVVVGIVNLATNIKDGGPGVRNAIL
EIVGGVMVGAAGAFVTQISI
>orf02224
(SEQ ID NO: 1470)
MMYSGKKFLLFSLLGILLGYLFHRLTLLYDSYTGNSLDKWTHLLMEGQDEVLQSPWNVSF
TGKSSAFFLLGFVMMLLVYLYLETGKKQYREGIEYGSAHFGTLKEKKLFYGKEFSHDTIL
AQDVRLTLLDKKPPQYDRNKNIAVIGGSGSGKTFRFVKPNLIQMNSSNIVVDPKDHLAEK
TGKLFLEHGYQVKVLDLVNMKNSDGFNPFRYIETENDLNRMLTVYFNNTKGSGSRSDPFW
DEASMTLVRALASYLVDFYNPPKTREQLIEESRLSQKEHQNLLKRQKKEVEERKKRGRYP
SFAEISKLIKHLSNGENQEKSVLEILFENYAKKYGTENFTMRNWADFQNYKDKTLDSVIA
VTTAKFALFNIQSVMDLTKRDTLDMKTWGKEKSMVYLVIPDNDSTFRFLSALFFSTVFQT
LTRQADIDFKGQLPLHVRVYLDEFANIGEIPDFAEQTSTVRSRNMSLVPILQNIAQLQGL
YKEKEAWKTILGNCDSLVYLGGNDEDTFKFMSGLLGKQTIDVRNTSRSFGQTGSGSLSHQ
KIARDLMTPDEVGNMKRHECLVRIANMPVFKSKKYNSTKHPNWKYLANQETDERWWDYQI
NPLNQSQENHLEGLRIRDLTFESSLK
>orf02225
(SEQ ID NO: 1471)
MSSEQQERMAVQYAERSLLFTVKSLLKILEWSRRQALAQDSAYKIGVQKLEELLQSPYSI
DTINLKKDFLDKPIDIEKFKAFLEKEEIPLAIAWQGDSLHFYTKDRSILDNHLDQLLEKM
VNDPEKLADFTMDKSLDDAIDEAKSQITFRQEGAVKQKEMVR
>orf02226
(SEQ ID NO: 1472)
MKVVNLYDLKQMGNKGGCTIQLIHHFPFGMGLGHLKKDYIEFKRVGIVDGKAVEVTLREP
YSRDLLQVVKSIKQRQKLIAYRYKEGKLLFVKEEASDVL
>orf02227
(SEQ ID NO: 1473)
MFSNANSFKAKIKNISKDKGIPAQQVQQHYLIEQVLKLISTSSYRDSFIVKGGYLIGQMI
GLDKRTTMDLDVTLKGTEMSRENLIHIFEEILCSKTDGFSFSVDKLEPIRQDDEYGGFSL
KLNATFDTLKEVVFIDITTGDKITPREITYSMTSIFTNESIKIWTYNLETVLAEKLETII
SRGLASTRPRDRYDLFTLYKLRKEEINLEVLKNALENTAEKRKSKDTIYNWEEQVRGIEI
SDYQKELWIRYQRQFKYAKDISFDNSVQVIREIMQQIF
>orf02228
(SEQ ID NO: 1474)
MVDKREKLMNSFNQYGFLTFKQVIDENLHYKTLLKMVAEGKIDAEEKGLYRLPDIYLDEW
FVLQYRFPKGIFSLETALWLHGLSLTIPFNMTMSFPYGTNTKNIKEADICPIILRSHYSE
GIIEIERLPGQFIKVYEVERVLVECLRPVHQVDLQIIAPAFKKYFQQNKIHLHKLFYYAQ
LFKVTDKLQSYTEVLS
>orf02229
(SEQ ID NO: 1475)
MRCLFFYPILKGSELMKTKNQESKGRSPLFKTIKHSFSQ
>orf02230
(SEQ ID NO: 1476)
MELKFVIPNMEKTFGNLEFAGEDKVVQRRINGRLTVLSRSYNLYSDVQRADDIVVVLPAE
AGEKHFGFEERVKLVNPRITAEGYKIGTRGFTNYLLHADDMIKE
>orf02231
(SEQ ID NO: 1477)
MRLANGIVLDKDTTFGELKFSALRREVRIQNEDGSVSDEIKERTYDLKSKGQGRMIQVSI
PASVPLKEFDYNARVELINPIADTVATATYQGADVDWYIKADDIVLTKDSSSFKAQPQAK
KEPTQDK
>orf02233
(SEQ ID NO: 1478)
MKQRGKRIRPSGKDLVFHFTIASLLPVFLLVVGLFHVKTIQQINWQDFNLSQADKIDIPY
LIISFSVAILICLLVAFVFKRVRYDTVKQLYHRQKLAKMILENKWYESEQVKTEGFFKDS
AGRTKEKITYFPKMYYRLKNGLIQIRVEITLGKYQDQLLHLEKKLESGLYCELTDKELKD
SYVEYTLLYDTIASRISIDEVEAKDGKLRLMKNVWWEYDKLPHMLIAGGTGGGKTYFILT
LIEALLHTDSKLYILDPKNADLADLGSVMANVYYRKEDLLSCIETFYEEMMKRSEEMKQM
KNYKTGKNYAYLGLPAHFLIFDEYVAFMEMLGTKENTAVMNKLKQIVMLGRQAGFFLILA
CQRPDAKYLGDGIRDQFNFRVALGRMSEMGYGMMFGSDVQKDFFLKRIKGRGYVDVGTSV
ISEFYTPLVPKGYDFLEEIKKLSNSRQSTQATCEAEVAGVD
>orf02234
(SEQ ID NO: 1479)
LAYGLSQNRLAVATGITRQYLSDIETGKVKPSEDLQQSLWEALERFNPDAPLEMLFDYVR
IRFPTTDVQQVVENILQLKLSYFLHEDYGFYSYSEHYALGDIFVLCSHELDKGVLVELKG
RGCRQFESYLLAQQRSWYEFFMDVLVAGGVMKRLDLAINDKTGILNIPVLTEKCQQEECI
SVFRSFKSYRSGELVRKEEKECMGNTLYIGSLQSEVYFCIYEKDYEQYKKNDIPIEDAEV
KNRFEIRLKNERAYYAVRDLLVYDNPEHTAFKIINRYIRFVDKDDSKPRSDWKLNEEWAW
FIGNNRERLKLTTKPEPYSFQRTLNWLSHQVAPTLKVAIKLDEINQTQVVKDILDHAKLT
DRHKQILKQQSVKEQDVITTKK
>orf02235
(SEQ ID NO: 1480)
MNFGQNLYNWFLSNAQSLVLLAIVVIGLYLGFKREFSKLIGFLIIAIIAVGLVFNAAGVK
DILLELFNRIIGA
>orf02236
(SEQ ID NO: 1481)
MNGVFLIFIIQADFLFDFLKVNGKGKPRTDQFALIVFA
>orf02237
(SEQ ID NO: 1482)
MYDVARYYIEETGALGEVPASLQNYIDYQAYGRDLDLSGTFISTNHGIFEIVY
>orf02239
(SEQ ID NO: 1483)
MYLIGYAIKFTPNCCNGFLWLVSAKRYFFSCIGQLWSQCISNDRLQKSIRLFTIKSFCRH
KPCESHRNPKVFEKCSLYHGKRGQVAKYHHCKE
>orf02242
(SEQ ID NO: 1484)
MAYPIKYIENNLVWNKDGECYAYYELVPYNYSFLSPEQKIQVHDSFRQLIAQNRDGKIHA
LQISTESSIRSAQERSKNEVTGKLKAVAYDKIDQQTDALISMIGENQVNYRFFIGFKLLL
NDQEFSMKSLTVEAKNALSDFVYDVNHKLMGDFVSMSNDEILRFQKMEKLLENKISRRFK
IRRLDKDDFGYLIEHLYGQTGTAYEEYEYHLSKKKLDNETLIKYYDLIKPTRCLVEEKQR
YLKIQQEDETVYVAYFTINSIVGELDFPSSEIFYYQQQQFTFPIDTSMNVEIVANRKALS
TVRNKKKELKDLDNHAWQSDNETSSNVAEALESVNELETNLDQSKESMYKLSYVVRVSAN
DLDELKRRCNEVKDFYDDLSVKLVRPFGDMLGLHEEFLPASKRYMNDYIQYVTSDFLAGL
GFGATQMLGENEGIYVGYSLDTGRNVYLKPALASQGVKGSVTNALASAFVGSLGGGKSFA
NNLIVYYAVLYGAQAVIVDPKAERGRWKETLPEISHEINIVTLTSDEKNKGLLDPYVIMK
NPKDSESLAIDILTFLTGISSRDGERFPILRKAIRAVTNSEVRGLMKVIEELRVENTPLS
TSIADHIESFTDYDFAHLLFSNGYVEQSISLEKQLNIIQVADLVLPDKETSFEEYTTMEL
LSVAMLIVISTFALDFIHTDRSIFKIVDLDEAWSFLQVAQGKTLSMKLVRAGRAMNAGVY
FVTQNTDDLLDEKLKNNLGLKFAFRSTDLNEIKKTLAFFGVDPEDENNQKRLRDLENGQC
LISDLYGRVGVIQFHPVFEELLHAFDTRPPVRKEV
>orf02244
(SEQ ID NO: 1485)
VKPSIVNRIKSNWTLKRLGKVAMTVAFTLVIAIFLLAMLGTVVQAAGLVDDTVNVANEYS
RYPLENYQLDFYVDNSWGWLPWNWSDGIGKQVMYGLYAITNFIWTISLYVSNATGYLVQE
AYSLDFISATADSIGKNMQTLAGVSANGFSTEGFYVGFLLLLILVLGVYVAYTGLIKRET
TKAIHAIMNFVLVFILSASFIAYAPDYIKKINDFSSDISNASLSLGTKIVMPHSDSQGKD
SVDLIRDSLFSIQVQQPWLLLQYNSSDIESIGIDRVESLLSTSPDSNNGEDREKIVAEEI
EDRSNTNLTITKTINRLGTVFFLFVFNIGISIFVFLLTGIMIFSQVLFIIYAMFLPVSFI
LSMIPSFDGMSKRAITKLFNTILTRAGITLIITTAFSISTMLYTLSAGYPFFLIAFLQIV
TFAGIYFKLGDLMSMFSLQSNDSQSVGSRVMRKPRMLMHAHMHRLQRKLGRSMTTLGAGS
AIVTGKKGQSGSGSSARTQADHSRPDGKEKSTLGKRIGQTIGTVADTKDRMVDTASGLKE
QVKDLPTNARYAVYQGKSKVKENVRDLTSSISQTKADRASGRKEQQEQRRKTIAKRRSEM
KQVKQKKQPASSVHERPTTRQEQYHDEQTSKQSNIQTSYKESQQAKQERPAVKSDFSSPK
VERQGNTVQEKTVQKPATSTTTADRTSQRPITKERPSTVQRVPLQNTRTTNQNRHH
>orf02246
(SEQ ID NO: 1486)
MKLKTLVIGGSGLFLMVFSLLLFVAILFSDEQDSGISNIHYGGVNVSAEVLAHKPMVEKY
AKEYGVEEYVNILLAIIQVESGGTAEDVMQSSESLGLPPNSLSTEESIKQGVKYFSELLA
SSERLSVDLESVIQSYNYGGGFLGYVANRGNKYTFELAQSFSKEYSGGEKVSYPNPIAIP
INGGWRYNYGNMFYVQLVTQYLVTTEFDDDTVQAIMDEALKYEGWRYVYGGASPTTSFDC
SGLTQWTYGKAGINLPRTAQQQYDVTQHIPLSEAQAGDLVFFHSTYNAGSYITHVGIYLG
NNRMFHAGDPIGYADLTSPYWQQHLVGAGRIKQ
>orf02247
(SEQ ID NO: 1487)
MMKFRKNQNKEKQIPKEKKPRVYKVNPHKKVVIALWVLLGLSFSFAIFKHFTAIDTHTIH
ETTIIEKEYVDTHHVENFVENFAKVYYSWEQSDKSIDNRMESLKGYLTDELQALNVDTVR
KDIPVSSSVRGFQIWTVEPTGDNEFNVTYSVDQLITEGENTKTVHSAYIVSVYVDGSGNM
VLVKNPTITNIPKKSSYKPKAIESEGTVDSITTNEINEFLTTFFKLYPTATASELSYYVN
DGILKPIGKEYIFQELVNPIHNRKDNQVTVSLTVEYIDQQTKATQVSQFDLVLEKNGSNW
KIIE
>orf02249
(SEQ ID NO: 1488)
MKIINIGVLAHVDAGKTTLTESLLYNSGAITELGSVDKGTTRTDNTLLERQRGITIQTGI
TSFQWENTKVNIIDTPGHMDFLAEVYRSLSVLDGAILLISAKDGVQAQTRILFHALRKMG
IPTIFFINKIDQNGIDLSTVYQDIKEKLSAEIVIKQKVELYPNMCVTNFTESEQWDTVIE
GNDDLLEKYMSGKSLEALELEQEESIRFQNCSLFPLYHGSAKSNIGIDNLIEVITNKFYS
STHRGQSELCGKVFKIEYSEKRQRLAYIRLYSGVLHLRDSVRISEKEKIKITEMYTSING
ELCKIDKAYSGEIVILQNEFLKLNSVLGDTKLLPQRERIENPLPLLQTTVEPSKPQQREM
LLDALLEISDSDPLLRYYVDSATHEIILSFLGKVQMEVTCALLQEKYHVEIEIKEPTVIY
MERPLKKAEYTIHIEVPPNPFWASIGLSVAQLPLGSGVQYESSVSLGYLNQSFQNAVMEG
IRYGCEQGLYGWNVTDCKICFKYGLYYSPVSTPADFRMLAPIVLEQVLKKAGTELLEPYL
SFKIYAPQEYLSRAYNDAPKYCANIVDTQLKNNEVILSGEIPARCIQEYRSDLTFFTNGR
SVCLTELKGYHVTTGEPVCQPRRPNSRIDKVRYMFNKIT
>orf02250
(SEQ ID NO: 1489)
MKPSSFQTTIENQFDYICKRAMEDERKNYMLYLSRIAKREVSFSDVGDYLVSQFATTDNY
STDFQIFTLNGLSVGVENDLLSEALRELPDKKREILLLFYFMDMSDSEIADLLKLNRSTV
YRHRTSGLALIKKFMEEFEE
>orf02251
(SEQ ID NO: 1490)
LATLDCVQCIYNFFKLFSFNLNTIAIHNQPICIFIFLCQAS
>orf02252
(SEQ ID NO: 1491)
MSEKRRDNKGRILKTGESQRKDGRYLYKYIDSFGEPQFVYSWKLVATDRVPAGKRDCISL
REKIAELQKDIHDGIDVVGKKMTLCQLYAKQNAQRPKVRKNTETGRKYLMDILKKDKLGV
RSIDSIKPSDAKEWAIRMSENGYAYQTINNYKRSLKASFYIAIQDDCVRKNPFDFQLKAV
LDDDTVPKTVLTEEQEEKLLAFAKADKTYSKNYDEILILLKTGLRISEFGGLTLPDLDFE
NRLVNIDHQLLRDTEIGYYIETPKTKSGERQVPMVEEAYQAFKRVLANRKNDKRVEIDGY
SDFLFLNRKNYPKVQVITTA
>orf02253
(SEQ ID NO: 1492)
MGHANIAMTLNYYAHATFDSAMAEMKRLNKEKQQERLVA
>orf02254
(SEQ ID NO: 1493)
MKRIIPVYIFQQVNVLLVSLYLLKLLCISELTILQILYCASLISFLWMYGQRKQVVKVNM
KTRMKWLGIGFVSLLIINLCFSLIHAQGTTNQANLIGLQHQVPWFSFLLLLINASMVEEF
LYREILWNLVRKLDIRVALTSILFVLAHHPGTILAWCLYVSLGMFLGLVRYKSDLWGSMG
LHLVWNLSVYVLFFL
>orf02259
(SEQ ID NO: 1494)
MKRITANQYQTSERYYKLPKILFEDEKYMDMKLEVKVAYSILKDRLELSLSRGWIDEEGA
VYLVFSNSKLMKLLGCSKSKLLSIKKILKEYDLIDEVQQSSSEKGRLANKIYLGELSSTP
VASSNRPSVKKKIGQVENETAPVSHSAPSETEVSETKYSETDSLFSEDEEERYTQPILKR
KVEKVTKYDQDYIWGLVQDQFRREGFSETASEIAMTDFERIYQYALDNVRFVRRAEVLAE
FVFNGLYSVWNNRVRKGGG
>orf02260
(SEQ ID NO: 1495)
MTKELQSSRYIVISFLVREMGIDIVEAISLMAELEKSGLVRLESSGDLILKELGGAL
>orf02261
(SEQ ID NO: 1496)
MIVILLSFFLQKIKKGEQYSTVLQNIFIKKKNPAKLIFGRVFGRKLN
>orf02276
(SEQ ID NO: 1497)
LQVWYNLQSDFEQEITLIMWNPFANLVFNQPLISFFADLNLKILGYSYTDRVKTWPDIGT
GCRYNNLHLILLAP
>orf02314
(SEQ ID NO: 1498)
MVICHNDYLLWLPEFSQPLTSLSQTTFFNLNIIRMMRNIDSDFHRRISFSLLVFFC
>orf02318
(SEQ ID NO: 1499)
LIEGHLVFADKPAQALVLLRKVGSPKKVSFLTLHLYFLILKIDILKITGF
>orf02324
(SEQ ID NO: 1500)
MFLHHLLQIKGGLGIQTSQGFVQNPNIRSRQECPNDKDFLTHSVRKSFNNLIAVFSKIKN
VQ
>orf02326
(SEQ ID NO: 1501)
MTNQAHNLSIFNLQIEITQGLFITIQLTNILKFNHGTTPIFICIIHRYTSTLIQKNQYFI
LSS
>orf02348
(SEQ ID NO: 1502)
MAVTKSQVFSRQGFDFSILGQDLTRLQDVSNLATIGTRIHKDSTANASWNTTSKLKAS
>orf02349
(SEQ ID NO: 1503)
MTEGNASCFNQVSPSFCFNGIAINRNVIELVTQDDKSTNPTITNDDIACIAKNHPRDIFL
VGKFHNASQLKTISWKDQIISLSTYFCITIAMQGFLKTDINSF
>orf02361
(SEQ ID NO: 1504)
MRLRDLRRVDFPDPDGPIKAVISLGWKDRETLFKAFFLL
>orf02364
(SEQ ID NO: 1505)
LKNHSNVFTHFINVDFWTVDINSTIENLPSYFSNINGIIHAIETA
>orf02365
(SEQ ID NO: 1506)
LHINPLNGFIFTIVNMDILSRKGYFFFRKGKDMLLIPVIC
>orf02387
(SEQ ID NO: 1507)
MTIHIQVVKTNMVILADRFFQGLILRSTDKFFIKIRLVRSHNLRFNNMDFSTVAVHENKG
RHHVDELLLRFIINSKATVAKKSIVAQGFRFDGNFFRKTRQTNHLNIIFYDNPDQIIFFQ
NGLITNSQFNRLHP
>orf02404
(SEQ ID NO: 1508)
MVKRRIRRGTREPEKVVVPEQSSIPSYPVSVTSNQGTDVAVEPAKAVAPTTGWKQENGMW
YFYNTDGSMATGWVQVNGSWYYLNSNGSMKVNQWFQVGGKWYYVNTSGELAVNTSIDGYR
VNDNGEWVR
>orf02420
(SEQ ID NO: 1509)
MRFIVGRFTSFSLGIEFSPTSKLDDLLFKIAFLMILATWIKARKTKEAT
>orf02424
(SEQ ID NO: 1510)
MANDNKSHYLIYRVLGISFEEGENIDLYQNKGRFLYKYAGSFLEEAAVLSFNEKFGTENT
>orf02433
(SEQ ID NO: 1511)
LHYRTTPTLIMVVQRDCLILSFPRQKGPIVGQMAIIL
>orf02435
(SEQ ID NO: 1512)
VFALLDNSTFLRKSLHLRKMEMFPVETEEITYKRKKSKGKRQAILAQFDSEEVHHQVEES
ICPDCQDDLKEIGASLQRQELVFIPAQLKRVDHIQHAYKCQTCSKNNPSDKIVKAPIPKA
PL
>orf02451
(SEQ ID NO: 1513)
LVCQTIKYWHKFHLHIGRCKLLIGLIPVLNFFIRADIDCLLVLLSLIDRQNGKQFNLCQW
IIASNGLNDSFEIIESLIHRNILSDIICPNQKKNFIYCSTI
>orf02459
(SEQ ID NO: 1514)
VGHNSGSFFLFLLLRLLLSPLLRNSISFLTSQGIPWKLSNNKTKPIDKPTASKSIATNPL
LLHLR
>orf02480
(SEQ ID NO: 1515)
LDFLNHLWVAHAGNSSSCTNISRNSFQGHHSCRTSSFCDTSLFRILHIHNNTTLEHLCQV
FI
>orf02505
(SEQ ID NO: 1516)
MLLLISLTQLIIFLFFERFNLLLKTFLLVDLKSNKSA
>orf02517
(SEQ ID NO: 1517)
MGFSMKLIHDLNTHTTHSTAKMLHNVKAIKNDFSIRE
>orf02524
(SEQ ID NO: 1518)
MQEHYTPKGKHLTIDNRRLIERWKNENKSNREIAGLLGKAPQTIHTEVKRGTTLQQVRKG
LYKKVYSADYAQTVYQFNRKRSVKKLILTKEIREKILHYHKQKFSPEMMVNKKQVKVGIS
TIYYWFHNGHLGLTKADMLYPRKRKGVKKQASPNFKPAGKSIEERPDVINLRLENGHYEI
DTVLLTKIKNYCLLVLTDRRSRHQIIRLIPNKTAESVNQALTLLLGEHRILSITADNGSE
FKRLSEVFPEEHIYYAHAYSSWERGSNENHNRLIRRWLPKGTKKTTPKEVAFIENWINNY
PKKCLDYKSPSEFLLGG
>orf02527
(SEQ ID NO: 1519)
VVPRYVTKHQGWDHNSHTITNSDDDPATLVTFRTFKFNVGNCTIPKNDQNGSSQKFSGIL
>orf02534
(SEQ ID NO: 1520)
MAYSTDFKQRALDYIKEGHSHVEAAKFFGVGVRTLFTWEKKDVNKDT
>orf02585
(SEQ ID NO: 1521)
MAVQANWSFDITHDSSFFFSNQKRGLNFSQMCFKDRRRNGFFDRKIFKFKFNNPIQIF
>orf02595
(SEQ ID NO: 1522)
MEIVLVSFSISFQHFIIAYCLDFSSAGFRNSQNFSNFC
>orf02608
(SEQ ID NO: 1523)
MKLKLLRVDTKVIMGSFLLVLSSLLALLLPLILKGLIDGSSIENIGSKVFQSFLIFIGQA
LFSSIGYYLFSQSGEKKIAKIRKKVIEGLIYAEKSFFDKSQSGELTSAIVNDMSVIREFL
ITTFPNIILSLVMVLGSIVVLFSLDWNLSLLLFITLPCMMFIILPLSNISEKYSRRLQEE
IGFLTGQLTEKIQEHELIKTNQAEKSVQDVLDNCIERVQNNSLKSDRVTSFETPFALLFI
FATIVVMLTYGGYRVSAGYISVGTLVSFLIYLFQLLNPISNIANFVTIYSSSKGSSVALE
NLLAVPKEKFEGGKSVSGQGLNFNHVYFGYDENRPVLKDITCSIFKGQKIAFVGPSGSGK
STIVRLLERFYKPLSGDILMEQSSIYDFNLKEWRSKIAWVSQNNAVLSGSIRDNLCLGLN
RLVTDDELMKVLDLVSLGDEIRSMKEGLDTEVGERGRLLSGGRSQRLQIARAYLKDAEIL
IFDEATANLDADSEYAIISSLYSVLKEKTVVIIAHRLSTVKDVDCIFFLEEGKITGSGTH
KELLENHERYARFVQEQMIE
>orf02621
(SEQ ID NO: 1524)
LIRYLDQYEDVILREIKAQFPDVAVDKLMEEYIKAGLILRENKRYYLNFPTLESLDSLEL
DQEIFVREASPVYQALLEQSFETELRNQINAAILVEKTDFARIKMTLSNYFYKVKQQYPL
TEKQQELYDILGDVNPEYALKYMTAFLLKFLKKDQLMQKCRDIFVDSLVVLGYIVQNEDG
KYELAIDFDKERLTFYLA
>orf02622
(SEQ ID NO: 1525)
MIGLKEVCRFLTDNTSLSTSMINHPIQINGNMAIVTCGSLDGLSHV
>orf02633
(SEQ ID NO: 1526)
MRERVRLSGSLFTSLKTREHIKSTMELFHKYVFFLIQEIKIKMINFLKIGDLPTL
>orf02643
(SEQ ID NO: 1527)
MIDHFEIKVKDLQISEGFYRSFLAPLDYKLAFKTSSLISFLSPNSPHPGGDFWLTQGTQD
PVHFAFLAENKEEVQACYEAGLEAGGRDNGAPGYRSEHPIYYAAFMIDLDGNNIEVVCHK
E
>orf02645
(SEQ ID NO: 1528)
VIVFLSRNKDGNAFCHLDLISIANPVWGWDDDFITWIDHSHKEGIERIFGSRSDCHLI
>orf02648
(SEQ ID NO: 1529)
LSNQFYFSLQTKPILKVKQFLLFQSQMIRVSEILQFSNKL
>orf02652
(SEQ ID NO: 1530)
MKHSHKKSFDWYSMQQRYSIRKYYFGAVSVLLGTALVLGAAASVQTVQAEENKQETTNSI
SVGRGEAATKPAEVSASNKEKTYAAPTVANPVETTPVKTGEVTKPAEKVEEAKDKKEEVT
HQDAIDKSKLLTALSRAKKLESKLYTEASAANLQTSIQAGQSLLGKADASEAELSAAESS
IQSSIIGLELRSNSNKGTVSETPVAKKANIVEAKEETKPAVTTTERSAVDSAILPISTAA
KVETTSAPASTNEILKPSLSLSDARQNPAIRKEDVDRGYSGFRTAGSGFRAAGSGFRAAG
PENKPILNPNNTIAFSDISQGLHSFRGIGHSRGGREIHYDVTTVRRGNRLNFTIKYSGPG
EFVNNNFILDKGDGFGNPSNATITSSNPRVREQSKSISQGANYVSHSGYSMTSATSTNTE
QTIRFSLPIINPNGDLSVRLKPVTFNVDQGGGGAATSNDPYSNSNYYHRANPLLLDANPY
GGTNNKTVSEDIDFQTVYLPTSKLPEGQTRLVREGEKGQRQITYKVHRFGNETLLGLPIS
NRVTKEAKPRIMQIGVAKELIDTVKPRVDQNKVGDTNNLTFYLDNDGNGVYTEGVDELVQ
KIAIKDGAKGEKGDQGERGLTGAQGTKGEKGDQGERGLTGAQGAKGEKGEQGFQGRDGEQ
GPKGEDGKTPTVKVTDGQDGTHTITINDGKGGITTTVVRDGFDGASPLVSTHRNEADKTT
TVIFYYDLNDNNQFDEGDTKLKEVVIADGKQGPKGDKGDNGKDGFTPEVTVTDNNNGTHT
ITITQPDNRPSLTTIVKNGEDGKTPKVKAERDDAKKQTTLTFYIDKDGDGSYTAGKDELV
QTTVVKDGQDGAAGASGRDGKEVLNGKADPTTEGKDGDTFVNTQTGDVFVKKGNTWEPAG
NIKGPKGDKGADGAKGEKGDRGERGLTGAQGTKGEKGDQGERGLTGAQGTKGEKGDRGER
GLTGAQGQAGRDAVTPTVTVKDNKNDGTHTITINDGRGNVASTVVRDGFDGASPLVATQR
NEADKTTTVIFYYDQNGNNELDASDKKLKEVIIADGAKGEQGLQGRDGQDGAQGQAGRDG
KDVLNGKANPEVNQGKDGDKYVNTETGDVFVKNNGNWDKEGNIKGPKGDKGERGEDGKTP
EVTVTPGKDGHSTDITFTVPGKDPVTFTVKDGKNGKDGRAPKIKVEDITSPSRIRRDTDA
AATPTRNGIRVTVYDDVNDNGVYDEGVDKVLNSKDIYNGIDGRDGSAPTITTKDNGDGTH
TITVQNPDSSESTTVVKDGKDGKTANITTTENPDGSHTITVTNPDGSTKETVVKNGKDGK
TPKVEVTDNNDGTHTVKVTDGDGNVTNAIIKDGKDGKAATATTTENPDGSHTVTITNPDG
TKNEFVVKNGRDGVDGRTPTASVRDNGDGSHTIVITNPEGVTTETTVRDGKSPKVTITDE
QNGTHKISVLNGDGTTTETIIKDGKSPVATVRDNQDGTYTIRVENGNGTVSETTVRDGKS
PTAKVVDNGDGTHTITVVNSDGTTTTTTVRDGREPKLEVIDNNDGSHTIKVTGADGKGTT
TTIFDGKSPKANIVDNGDGTHTLTIVDSDGREYKSIIKDGKDGKDSVSPTVTVKNNNDGT
HVVTITNPDGSKTEMVIKDGKDGKCGCQDKPVTPSNDKPVPPTPNVPTPEVPVKPVPAQP
TPNVPTPEVPVQPTPAVPTPEVPVKPVPAVPEQPVVPTPAQPATPVNANPVAPTTGKENR
GDKLPETGSQSDYISVLLGSGILLSLYVGRRKED
>orf02654
(SEQ ID NO: 1531)
MRNLLSTKVQRQLRLMETLIQNRNWMKLHELAEKLGCTERILKSDLNELRIAFPSINIQS
SVNGIMIDLEVNTSVEDIYQYFLANSQSFQLLEYMFFNEGLPIYRTIENLYFSSANLYRL
GRNITKVLSSQFQIELSFTPSEIRGNEIDIRYFFAQYFSERYYFLDWPFPDLPEEDLTEF
ADFFYKITNYPMRFSIYRMYKLMIAISIHRVKNGHFIDLPNHFYKEYYPLLKSIPNFQET
LAYFSKHFGLEMTPDTIAQIFISFLQNDIFLDPQEFFNSLEDNSQARYSYQLLSQILERL
SKQYKITFTNHDELIWHLHNTAFFERQEIFSTPILFEQKALTIKKFEVYFPDFMGSARQE
LAQYRQAIGQHDHPEQLEHLMYTILTHAENLSTQLLENRPPIKVLIISNFDHAISLTFVD
MLSYYCNNRFTFDIWDELKTSPEILNQTDYDIIVSNFYISGITKKFICRNHLSIMNLVNH
LNTLSNEIHLSNTL
>orf02655
(SEQ ID NO: 1532)
MIFKIGLFYLGQFVSLDMTVHKPIKKLQGWVVLSSLPFQSLDILTFFRSLLS
>orf02657
(SEQ ID NO: 1533)
MGFYLMVASMLLGLLALKIGFSQFKENKDKFLSILTSLAGLALVLVAVWLGWPK
>orf02677
(SEQ ID NO: 1534)
MLDSDIGCSRKNLLGLFWIRRRRNIHIVDRAMEKGISNRAPNKISLKACFFNFF
>orf02696
(SEQ ID NO: 1535)
MAFNQFNRCITLSIPTAPNIPTSVVHRTYLHDATVPNNVREKT
>orf02698
(SEQ ID NO: 1536)
MQQITEIIIAFATSFLTVAVGGIVKAVKDYLLRKGGEKAVIIAEILAKNAVHAVEQVASE
TGYKGEEKLEQARAKVRAELTKYNISMTDKDLDTFVESAVKQMNDAWKGR
>orf02699
(SEQ ID NO: 1537)
MKIEFFNFLRSVIQTEDGLVLYALALIVSMEIIDFVTGTIAAIINPDIEYKSKIGINGLL
RKISGVLLLMILIPASVLLPEKTGFAFLYSICLGYIAFTFQSLIENYRKLKGNVTLFQPI
VKVFQRLLEKDDDTKKGE
>orf02700
(SEQ ID NO: 1538)
MLKVTKTRQLVTEFFAQDGDQQKLVKTTVINTDNKAVSTISETLHDPDLYANNRISMRKH
EQELREMRYKIEDAILAELEADSEHKE
>orf02702
(SEQ ID NO: 1539)
MTKFINSSGSLHLNIYIEQVSQDIANNSSRVSWKATVDRDGAYRTYTYGNISNLSVWLNG
SSVHSSHPNFDTSGQEFTLASGEVTIPHSGDGTKTFAVWASFDPNNGVHGNITVSANYTL
SSIPRSSSVSDNALSGNRRLGSPHTLTIDRKSSSFTHQVWYRVFGSNWIDLGKNHATGVS
FVPNIDLARYNTKAKSGTMDICVRTYNGTTQVGNDVYSNGWYFEIPESVKPTFSGITLTD
MNTVARQLLSGNNFLQIISDIQVNFNNPSGAYGSTITGYRAEIVNKNQVTTVNGGRLGMM
NFNGSATIRASVVDSRGRQSDTRDITINVIEYFAPAFSFTAFRTRETPNIIQVVRNAKIA
PITLSGSQKNVMTLSFKVARLGSTTFTADHGRASGIWTTQHTLNNSAANMAGNYVATKSF
VVIGTLSDKFTSTEFTATVATESVVMSYDKDGRVGIGKVAEQGGAGSLDVLGDIYARNKP
IQQYQLTDNNGCGKLIKQDFNTMKETGTWWINGSSQNNPFSGTWGMLEVFRPNPGSHERI
QRFTTSTGYMAVRENGYDNNWRPWRYLVQQSKSTNNSDYVALLKSESTPTPWQNAILQNG
WNHHRDYGGVQFSKTFDGVVCFKGTCKGGKIARESIILTLPEHFRPSTTLFKTALNNDYG
SAVIGIYPNGNVVVKSNVDATWLNFDNVFFKI
>orf02709
(SEQ ID NO: 1540)
MLLTIHDANLQKVAFIDNEKQGTLNYYDDTWTRSLATGSSTFEFTVFKKAVKSDLPLAKA
YHHLNEHAFVSFKYKGKSFVFNIIIVEENEQTIKCYCENLNLELINELANPYKSNKAMTF
KEYCEAMDLLNYTHLSIGINEISDYKRTLEWEGQETKLARLLSLAKRFDAEIEFDTQLNA
DSTIKKFSVNVYHENDDNHQGVGRVRNDVIVKYGKNIHSITRKVDKTGIFNTIRPTGKMP
TVEEELSGDKGSKSETVKNADGSTTKTTISTASDGTKSKTIVHTKVTKLADKTRITTTTT
TRSDGSIEQTVTTSKKGGASTSETKVLKKPNPKEKTNTTEDVLTIEGLDEWEVKNEKGIV
EFYQRGQALYAPISMQLYPSTFTHSTGELDQWTRKDFHFETDEPNELRRLGYLKLKKYCY
PAITYEVDGFVDADIGDTVKVHDDGFAPLLMIQARVTDQKISFTNPVRNKTIFDNFKALE
NKLSADIQSAFERLFEAAKPYTIKLSTDNGVIFKNQIGQSLVTPTLYKGGKPVVVGVTWR
WALDGEVTTGMTYLVRGSNVTDTVTLTVAAYIGNKEVAVDEISLVNVADGKLGTPGTPGR
DGRTPYVHTAWANNATGTDGFSLDSSINKLYIGIYTDFEPNDSTDPKKYKWAKVKGEKGE
KGDKGEPGQRGLDGLQGARGEQGLPGRNGADGRTQYTHIAYSNSADGTKDFSVSASDRAY
IGMYVDFNRADSNTPSDYNWTLVKGSDGANGVAGKAGTDGRTPYLHIAYATSNNGSQGFS
TTDSTNKTYIGTYTDYTQADSTDYRVYKWTLIKGADGTGISNVTNYYLATTVSTGITRTS
AGWTTTPQPITSDKRYLWNYRVELYTNGTSKTTEPTVIGVHGEKGERGLQGLQGLQGARG
EQGIPGPRGADGRTQYTHMAYADNATGGGFSQTNTDKAFVGVYIDFNPTDSRNPADYRWT
RWKGRDGANGVAGRAGADGRTPYLHIAYATSNNGSQGFSTTDSTNKTYIGTYTDYTQADS
TDPKKYKWAKVKGDKGEKGDKGERGLQGLQGLQGARGEQGIPGPRGADGRTQYTHMAYAD
NATGGGFSQTNTDKAFVGVYIDFNPTDSRNPADYRWTRWKGRDGANGVAGRAGADGRTPY
LHIAYATSNNGSQGFSTTDSTNKTYIGTYTDYTQADSTDPKKYKWAKVKGDKGEKGDKGE
RGLQGLQGLQGARGEQGIPGPRGADGRTQYTHMAYADNATGGGFSQTNTDKAFVGVYIDF
NPTDSRNPADYRWTRWKGRDGANGVAGRAGADGRTPYVHFAYSENADGSGLTMTDNGQRY
FGHYSDYEKPDSSDKTKYKWADRWAKVDGGYVNIYALSKNRSIGKSYHVSEFNMDVLSGN
ITLKAIGSDPYIGAVSSHPGIFIKQQGMKIPVIQGRSICITITNPLFRKNYISFFNSLGK
TVKTYKHYNTNKFLISSADLVGVEFIALRYGAGSSNIQIGTVLETKVKVEYGTVHSDWSP
APEDIESNINSKADQGLTQEQLNALNEKSQILEAEMKAKASMEAFSELEKAYNAFVKSNA
DSRKKSESDLVEAGRRIDLLTTQFGGLAELKTFIDTYMKSTNEGLIIGKNDASSTIKVSS
DRISMFSAGKEVMYISQGVINIDNGIFTASIQIGRFRTEQYHLNKDVNVIRYIGG
>orf02711
(SEQ ID NO: 1541)
MTKIMTFNGVDMSKFFRITDIIRPIGNKRSVSTDNAPLLGVNIQQVKIGEKEHIIKFDIK
TTNAIEMEQLKHDLAGILNVLEPVKITYGDEPDKYYMGLPVDEITPENLTRWFQRSELKI
IIPDGVAHSTTLKNFDIDTNETSAPDRIVFNLTNTGTEPAYPIIRIKHNSENGYIGVVNN
RAAFELGNREEADTEKYRDSETLIDYRGTNILKGFQNGTKGVAVTNDNKERLVGTLSTTS
MWGRNHIELSNRGTVEKNRNNAQSLTWAIPVDSSGEVGSLNDYLLWRQVFMAAVANQYGF
IKVTVSDTDGNFLYGVETYKRYQTLDCEYSFFTTDGKGGYKFIKWWYFTGTGAQVGKLDP
FSAEKGWSELKRNDDRVQVFFDGSHYDFIIPEIKDKKSAKIHITLGALRDWPLVSHMYVD
EFMYRKDFVTKSRDIPNRYPIGSNVVINSEDDSVYIDGISKVSEVVDGSHWPAIPPGKSQ
LELYFSRFVKKKPTVTIEFEERWI
>orf02714
(SEQ ID NO: 1542)
MADGKVTIVVDVDGNKVKVLNDELDKAAQKGDRGSDSLKKFAIGGAAFKLASKAVDLLTD
SLGGAIQRFDTLESYPRVMQAMGHSTEDVTRSTKKLAAGIEGLPTTLNEVVGTAQRLTSI
TGDINKSTDLTLALNNAFLASGSSSADASRGLQQFSQMLSAGKVDMQSWKTLQETMPYAL
QKTADSFGFAGQSAQNDFYSALKEGRITFNQFSKKLVELNGGVGGFAELAKSNSKGIQTS
FGNLKNAVVKGVANTIKALDDLTKAATGKTIAENFDALKVIINAAFGVIVNVIKASTPVF
QTLFSILGTGASVISSLTPVIISLVSALVAMRAANEAITATKNLINSWQTFKTTATGAIQ
IINLMTAAQATCGSVTKAQLVANLANNGALTASNLLYGVLTGSISLQTAATIAATAATTA
FKAALTALTGPIGLVVAGVGLAVGALVGLWQWLTAESEETKRLKSEQEELVKSTDQLTDS
VKQSAKERQKNLESVKGNTESYQKLADEIVQLSQKTNKTAADKKNLKKKIDALNASVSGL
NLVYDKNTDSLSHNNDQIKARISAMEAESTWETSQKNLLDIEQKRAEIGEQLKQIAEQRK
KWNEESNVSDSVRKERLQELNDKETELKNTQTELQTEYEKTSQVQQAASEAMAAAAENGS
NRQVISYEGMSKAQQKAVDDMRSKYNELLETTTNMFDQIQMKSAISVDEMIANLQKNQEA
VNNWATNLNTLAERGVNEGILAKLQAMGPQGGLYVQELVNASDEKLATLNEVFTQGGESA
MNGLTAGMDTGALGITDKIKGIVQSQVSSLQEEIAAADFPEKGKNIPEGVGDGIKAGAEI
ASEASKNMANDIKESFTSEMDINSPSRVFNEYGGFITTGLAEGVDKGTNQPVSSVTNLAN
QIKKPFDSLQSDFTYIGEMAMSGLNAGLWSGSGSVMATANSIAERVKATIKSALDIHSPS
RAMRDEVGRFIPQGIAVGIEADAGVVEKSMLRLKESMMIDTRPEIALGLNKKLGAQVTVK
QSSKQTIAEKIKVTMDKSSELLEKALDVAETAVRRPNEMYLNDGTLVARTGDKFAKYQSE
QLRRDNRMKGVLS
>orf02715
(SEQ ID NO: 1543)
MSMKLNDALITNFSIADKEYDIDLSFNKVLDVFEILKEDEMTRLEQAQLIVHLLTGQELY
DIKEVVDCWIYIKEHFLGIEKETVQYDLLGNPMPKAKGEEEQEKLIDFEQDAEYIYASFL
QAYGINLLKVQNELTWTEFKALLNALPDNTIMQQIIEIRAWKPEYGGDKNKMRKLQAKYS
LGKEGEDNG
>orf02717
(SEQ ID NO: 1544)
MTDIQIELKRTGFPVKIGEVELWFDTSQESLMCFYDMEEELKRRLVQYELDVVSANINNK
IERDGVTKEVVAGAIELEKKQLEIQYDLIFGDGTFDKLYSIYPDYNALNNALEQTAIMLH
DKLEEVAEQHKTVVKERASHYLNKGKVTPIKNNKKQKKNKKK
>orf02718
(SEQ ID NO: 1545)
MTRQKNALRGHFVAPYNGGTEPSTEDTWLELAKWISDVSDDTDEKTDDQAYYDGDGVEET
TVVSVKGAYTFEGTYDPDDKAQALIAGMKYKTGDDRKLWHKVVSSDRKKQWVGAATATEI
KAGSGAASDYEAFGCKLSYNSTPKETGIG
>orf02719
(SEQ ID NO: 1546)
MRENDFQNVLLKHIKTLNLPVEPRFDYFEDDKDDLVINQIPGGKVDREYMDGTQEVSLPF
EIAVKAKKNSVANDTIWLVTSELAKIDLVLPSDNNSYEYMGMEVSRPAMKGKDEQGYYYY
TIEIVAKIVIERNKQ
>orf02720
(SEQ ID NO: 1547)
MNIAIKVDLQKAKQKLSNESMTRGKIAVASKILLDNEQYIPLRGGELRASGRIVGQGDAV
VYGTVYARAQFYGSNGIVTFRRYTTPGTGKRWDQVATSKHAEEWARAFVKGMGL
>orf02721
(SEQ ID NO: 1548)
MTYLTQEEFDELDFDEVTDFEKLAKRAKIAIDLYTNGIYQKDIDFEKEIAYRKSAVKLAM
AFQIAYLDASGIMSADDKQLANSVSIGRTSISYSTSQSTLAGQRFNLSMDAENALRQAGF
SLVVGVAYDR
>orf02722
(SEQ ID NO: 1549)
MALYKATKNLFFEQLNMDVIVDDIIELDEDYAKEVNKKLKNAFPDVKNVLELVDKNGTLE
PEDAPSVDDASQATVED
>orf02723
(SEQ ID NO: 1550)
MPSNQNNAVRRYEKQYAGILETVFGVRAAFSNALAPIQILDGVQENSKAFSVKTNNTPVV
IGEYKTGENDGGFGDNSGAQSRFGGVTEVKYENTDVNYDYTLTIHEGLDRYTVNNDLNAA
VADRLKLQSEAQTRTVNKRIGKYLSDNATKTEALADFTDDKVKALFNKLSAFYTNNEVTA
PITVYLRSEFYNAIVDMASVTSAKGATISLDENGLPKYKGFTLEETPAQYFETGVIAIFS
PNGIIIPFVGISTARVIEAENFDGVKLQAAAKGGTYTLDDNKKAIYKVTGTIV
>orf02724
(SEQ ID NO: 1551)
MAFTTEELLNLGLTEEQAKSVFALRGKELNEDKSALETIKQERDSLKSQLQKAEEQVEHL
KSLENISAEQKDAIDKLQAEYDKYKNEAAAELAQTKKVSAISLALKDTNAFNPDKLMKFI
DVDAIQLDDNGKPQIDEVINGLKESDPYLFKAEESKPSPNILPQGNPAGEGTSDVDPFQA
IIDGYGK
>orf02727
(SEQ ID NO: 1552)
MKKKRKQITFNDQQFPLQMQGVGDIYEKLQIDIFDRMIKRLKERGSIDLMRNPYIWQLEK
LNDMHMLNEQNLKLISERTGIAERLLRDVIENEGLKVYKDTKQQLEEDLNKIPEGEISNG
VTDSLEAYSRQAVSDLNLINTTLPKSLQVAYKSIVEETVAQVVAGTKTSDVALHDTIMKW
QKNAFTGFVDKGGRHWKADSYARAIIKSTTYKVYNEMRTRPAEELGVDTFYYSMKAMARP
ACSPLQGQIVTKGTGREIDGITIYSLLDYGYGTAAGCLGIHCGHYLTPFIVGVHELPNLP
DYLKNLTPEQAEENARIEAGQRGLERLIKTHKERLHYAHTLQDDKMIQAERLKVRGYQTK
IRNLINQHDFLTRDYRREKLYIS
>orf02728
(SEQ ID NO: 1553)
MSLFQKVKDFFSRGRYYMQTSNLNSILEHPKIAVTQEEYDRIKRNLVYYQSKWDDVQYKN
TDGDIKSRPMNHLPIARTASKKIASLVYNEQATITTKNEILQKFLDDMLTNDRFNKNFER
YLESCLALGGLAMRPYIDGDKVRVAFIQAPVFFPLESNTQDVSSAAILTKTIKSEGRKNV
YYTLVEFHEWVTADGQETGSTNDKKYYRITNELYRSDVNDVLGQRVNLSELDKYKNLEPV
TVFENLSRPLFTYLKTPGMNNKDINSPLGLSIFDNAKTTIDFINRSYDEFMWEVRMGQRR
VIVPEHLTQRQYQRPDGTIDFRPRFDVEQNVYMQIGGSSMDAGGITDLTSPIRANDYILA
ISEGLKLFEMQIGVSSGMFTFDGQGMKTATEIVSENSDTYQMRSSIVALVEQSIKELCVS
MCELGKAVGVYSGEIPELDDISVNLDDGVFTDRHAELDYWAKMVAAGFSTKKRAIGKTLN
ISGVEAEKELNAINSELLPMNDAELAIYGMHDQNEEKADDKG
>orf02730
(SEQ ID NO: 1554)
MTFNVQKNINPHFKSVWISSLPYNVLKGGRNSFKSSVIVLKLAYMMIRYIIAGEAANIVV
IRKVANTIRDSVFNKVWWALNLFGIAEQFTKTVSPFKIVHKTTGSTFYFYGQDDFQKLKS
NDIGNIIAVWYEEAAEFNDQEDFDQSNVTFMRQKHPRAKFVQFFWSYNPPRNPYSWINEW
FESIKTNKNYLAHSSTYLDDELGFVTEQMLEDIERIKENDYDYYRYLYLGEAVGLGNNVY
NMSMFHAIDALPSDDKLIGISFALDGGHQQSATACCAFGITAKGKVILLDTWYYSPAGQV
VKKAPSQLSKEIYAYMRSVIEKYRVQALQYTIDSAEGALRNQMFLDFGLKWHPVAKLRKV
TMIDSFQSLLAQGRFYYLNTENNKIFIEEHKMYRWDEKTIKSDNPSVIKEDDHTCDTTQY
FVLDNAKLLGLRVGNV
>orf02731
(SEQ ID NO: 1555)
LPRDGTKNLKPVTERTKDEARAISSKGGKASGIARRKKADLKKAFETLLSLDVTDSKIKK
QLEEMGMAGNNEALLAFATFQQAVKGNQKATENIIKLTNTKDKYDIQEQKERIKALKYEN
RERAEAEKGSSETIEIVDAWAEDVRGATDDL
>orf02732
(SEQ ID NO: 1556)
VAQKLTKLKDIFKHVSSIDLGKEILFEDLELYNKETETSKQYQSIEEAENDLYLMEKVNK
INFTLGGGRGANFEKGKDGKYPGFRGAGGARDSGSSKALHPASLNNQGRFSSVEGAIQGF
IKKHGGSRTEYSTAVDSQGFAHNYVHGGKNSVQILPISGGFTAIHNHPNGSNFSSTDLHS
FAALKGMNTLVATNSSKAYRITKGANFDAKGFDKAVSKSRFTTKDYNKGADLWLKKNAKK
YGYTYSYE
>orf02735
(SEQ ID NO: 1557)
MLQIEYVDIKSIKPYHKNARHNDGEATEKVAASIKAFGFQQPILVDDNNIIITGHTRLKA
ALSLGIDTIPIAHAVNLTDEQIKAYRLADNRVAEYSTWDSELLNIELSQFETIDMAQFGF
ELSVTGFNFGNEEEQQEETENEEEDAEDFHRDTTINQYNLFNYDDTRVEGFYNMPKIEGV
DHIPKDFQGFNYVLNKPDYSSCVHFFLDDYQFERIWQRPDFYIEKLLEFDSALAPDFSLY
LDMPIAMQVWNIYRSRLIGQIMQDYGLTVIPTVSWASEESFDFCFDGLPKNSTLAISTIG
VKQNKEQFEVWKNGVTEMIKRLTPKRIVVYGGKVEYDYKDIEVVYFENATTERMKESGTK
TN
>orf02736
(SEQ ID NO: 1558)
MNVIGACQKILFYSPTQAYVLLNAWFNDYFRATYTELLENAILDK
>orf02738
(SEQ ID NO: 1559)
MNPEIIDNINKPSHYQGANGLEAIDVVHNFVGSLSGASAFFWGNAIKYMLRFQKKNGLED
LKKARKNLDWLIEEMDKEGR
>orf02739
(SEQ ID NO: 1560)
MFFQDSEIEEFELNDTLRNDYITAYPDEIELMQSTGLKDKNGKEIFEGDIVRTTRFLGRA
DEIGGFYEYEKDYVGVVKVLEGSWVIDTGSVAVRLWSEIDESEVLGNIYENLEFLEVNE
>orf02740
(SEQ ID NO: 1561)
MEDEQNILETQLILGKQVLEIVLDLLKDDSKIGVVLPLNINDREFTITVEKEVTDRD
>orf02741
(SEQ ID NO: 1562)
MTQTLEEGMKNQSKCIKIPMEIRPFDVGYRIVNKHGQALALKNGASIFALPSLAEKAIKK
EFGKNDPDFDIEKHFVEEVAIVNLSKFHSYFEEVE
>orf02742
(SEQ ID NO: 1563)
MNIKALIKKYEELWNEHSPFYEPVPYTSMVELFLKELKQLDEPEKVKVPRFVAEWIEEAR
KACKDVVELFEFDFTNDEVRKWFMQERPFDLVARAWLDGYEVEEEKRYLVTLKNRQPLVK
SQSGSTLYFSQDITARNYKGTQKELEDANFGWVFDCEGIEIEEVE
>orf02743
(SEQ ID NO: 1564)
MMEELKQKVNEVYNWTVEDGKPQPPKQDLPQAVKERVDYFWEMAEDGMTFMGAMECIFAD
EKPTDYDLGATKDWLPKSKEFDDWIGYAPSMAQVVIAVYLIYRGN
>orf02744
(SEQ ID NO: 1565)
VIEVNIKFDNFEAHGFYQDDTKLGKIRDAIISQMNNGHVVVLGEDRGILLNPKVIKSVQF
KVVEDNQI
>orf02745
(SEQ ID NO: 1566)
LYPTVKAIIDGMTDAGIWTDDNHKVIKKLSFVYGGLSEEKGHYRLEFDIEEV
>orf02746
(SEQ ID NO: 1567)
MTTENLKSALEYAVELNEHGLEILTAADGTEYYDANKFNLKELDPKRYPKTLELSTLTSL
VDYLKTDLNNLKNQRLIVAVEKNDEVCVWSENDEIEHRTLLVDVKARIPELSFGRFLSLE
QFNIMLQSNFIDDNDRGTLLEFASALKIENGAEIEDNGVSQVATVKTGVASLAKGKAPNP
VTLRPYRTFSEVEQPASLFVFRIDKQANMALFEADGKRWVADAVGNIASYLKEQLADQKH
ITVLA
>orf02747
(SEQ ID NO: 1568)
MDKKLIGLDLTHIADGGLQEKLDKELEKVFDNILDLNTDAKAKRKVTITLTMSANEERTV
VDTTMEVKSKFAPQNGVATTILIGRDFDTGQVHANELKSTVPGQMYFDENGEILTDIGQP
VAEIEQQAETKSDIIDFNKKKVGN
>orf02749
(SEQ ID NO: 1569)
MESAGHECIGFCEIDKFARASYKAIHDTKGEIELHDITTVSDDTIRGIGHVDVICGGFPC
QAFSIAGNRRGFEDTRGTLFFEIARFASILKPRYLFLENVKGLLNHDRGNTFEVILSALD
ELGYDVEWQVLNSKNFGVPQNRERVFIIGHLRGGSGRKVFPLSGDGAAITCEQPKINKVG
NTRKKGKSQSGDVVSIDSLAPTLCSTTTQKDPLKVLIENEIKQFGVLQPNYNQSGVVYEI
DGISPTIRAYQGGNLEPKIRVKEATKQGYQEAEIGDSVNLSHPNSKTRRGRVGKQIANTL
LTGESQGVVEPDFRIRKLTPRECWRLQGFPDWAFDKAQEVNSNSQLYKQAGNSVTVNVIS
AIAQGLGGN
>orf02751
(SEQ ID NO: 1570)
MINNVVLVGRLTRDAELRYTQSNIAVATFTLAVNRPFKNEAGEREADFINCVIWRQLAEN
LANWAKKGSLIGVTGVIQTRSYDNQQGQRVYVTEVVASNFQLLESRNSQQNNQGHQDHHG
GYQQQGYSNQGSSFQNGNSYGQQGSFVEGNTTNLVPDFTRDNNPFGRPTNPLDISDDDLP
F
>orf02752
(SEQ ID NO: 1571)
MRCFYVSGKIADLDLGSEINAENSFMAAIEFVKRYTDLLKFGSNEIKVSEVEEVQNDK
>orf02754
(SEQ ID NO: 1572)
MVKDVTNSLTEIKVDFQPAVINVDREAIEAQVAAAIAQYSGREVTVDNYKEVYEERTRFN
KLIGGLDTQRKDFNRQINEPAKDFDKWVKEKVIKPIEAVTDAMSAGLNAIDEHERLMRVD
VVRATFEDKCMVAGIEKSTFADKYDEYSLKKYFKTGKYELKKTTLDEMDGLVLSEFDALE
EYKANKQAIQEQAQEYDLPADSYIRHLEDGKSLVDILKMMKTDRDAEIARKEQKEIQEKA
KAERLEEIAQSAKKNANANIKAYDAETGEILEQGTITPEPQNNAREVAKFEPSEPLVKLV
RLELHGGLEQWENTQEYFEDNFIGFETLED
>orf02756
(SEQ ID NO: 1573)
MADLTFAELQRKMQIEKQTKQGVKYPFRTAEDINNKFKSLDSGWSVSFPEDDIIQKGDKL
YYKAVAVVKRESDGTIEKAIGWAREEDVPIFHTQKGDVKQMQDPQWTGAVGSYARKYALQ
GLFAIGGEDVDEYPVEESQEQGQNNQQQKPNNQQAQGQNQVRYIDNTQYQEINDLINDIA
KIKGMPFDTLANYVLSEKLKGLQDFHRVQVGDYEVLKNYLTEQLAKAKAKAKRGN
>orf02757
(SEQ ID NO: 1574)
MPNWAEGTLKLRGRRENVASALKEMLLGNKGATLEEEYDGTLLIFKNEYDYFYINGTRRA
FISSKDIEIWLDDDFVIIELEDFEQAWAALADNYTEISSKFDVDIKIFTFEMGMEFTQEI
EISKGEIIKNIVNENFTNYSWDVPFSRLGG
>orf02758
(SEQ ID NO: 1575)
MKKIATAMNVSVSDLFTQDTPIKKNRHSTPVNPKIYKEFIDNVNQYQRLIGATYEKISNI
IGKSNSYIYDVIDKQRKSTLSIKSNASLTKGSMILRQEIEKIESGKNRIPSKLTYQTIDR
DSEVVFRFNGLIKSVNELSDKELQIIVSIFDALKIPAKISNIEIRETNVFGGGK
>orf02760
(SEQ ID NO: 1576)
MKKLPSQQKYLRNDGQLVTIKGFDAYLQYRGSQSWKKEMAKTVKMTR
>orf02761
(SEQ ID NO: 1577)
MPDITNGREKVNDFLKDKGIKKTSLAIAYGFKRQEVTNILSGTTKGPRANSFILQVIEDY
GIE
>orf02762
(SEQ ID NO: 1578)
MFETFEKIKSLAKKQGISLNTLEDRVGLGKNYIYSLKNKKTPSAEHISKIADYFNVSTDY
LLGRTDNPTIANKKEQFFFEGKEVDVEELASTAMRFNGKPLTEEDKKAIQNIIEIYLRKQ
>orf02763
(SEQ ID NO: 1579)
MTEKEFSQNLGIDIEIFEDGLFPDEAFYIPALKTMFLSDAISDEKRVQVALHEIGHRNHA
PDTYQLFREKCELEANRNMIHHLMKAELDIAEDATTFNYLVFMEKYNLKTIADEIMVKEE
YLALLN
>orf02764
(SEQ ID NO: 1580)
MNIIAIIIIVIFVGGVIGAVIDNQKKSPEQRERELETFRANQEKKKQEKKQNIITCPNCK
SKDVTFLQQDKKAFSVGKAVGGAVLTGGVGALAGFAGKKGNKQWHCQNCGNFFETK
>orf02765
(SEQ ID NO: 1581)
MWMEELSNGKYKFFERYKDPYTEKLKKVSVTMEKKTPQARNQAAILLQEKINKKLSTKQV
ESITFEEIYNLFYKSWAQTVKESTKHNCKSVDKKMKEVIPSDTILANLDRRFLQEAIEKI
IESNGYITAKKVRHRLRGIFNYAVQYSYIENNEVDYTTIPQKPKTLEELEKKRNNFLTMQ
EIKALVDVLNRREYHQKYADMVLVLTLTGMRYGELTALQLKNIDFENNKIEITGNFDSVN
KIKTLPKTTNSIRTIKVSESVIEAIQRQIVRLSERFQPLSSDDYIFCFEKWNQPTTIACF
IQILKKYGKQAKIEKNLSSHIFRHSHISFLAESGLPIKSIMDRVGHSNAKMTLEIYSHTT
EDMEDKLVNKLDTIF
>orf02777
(SEQ ID NO: 1582)
LHPFTRNITCDRYILALFSNLVNFIHVDNPTFCTLNVKVSSLQEFEEDIFHILTYITSLR
QSCRIRNRKRYIQALSQGLSKESFP
>orf02778
(SEQ ID NO: 1583)
MIINRHCQGTLGTILTDYIVVQDMEEFDWFWYLRQVCQDFLNQFFSNNFLS
>orf02786
(SEQ ID NO: 1584)
LKTKIGLASICLLGLATSHVAANETEVAKTSQDTTTASSSSEQNQSSNKTQTSAEVQTNA
AAHWDGDYYVKDDGSKAQSEWIFDNYYKAWFYINSDGRYSQNEWHGNYYLKSGGYMAQNE
WIYDSNYKSWFYLKSDGAYAHQEWQLIGNKWYYFKKWGYMAKSQWQGSYFLNGQGAMMQN
EWLYDPAYSAYFYLKSDGTYANQEWQKVGGKWYYFKKWGYMARNEWQGNYYLTGSGAMAT
DEVIMDGARYIFAASGELKEKKDLNVGWVHRDGKRYFFNNREEQVGTEHAKKIIDISEHN
GRINDWKKVIDENEVDGVIVRLGYSGKEDKELAHNIKELNRLGIPYGVYLYTYAENETDA
ENDAKQTIELIKKYNMNLSYPIYYDVENWEYVNKSKRAPSDTDTWVKIINKYMDTMKQAG
YQNVYVYSYRSLLQTRLKHPDILKHVNWVAAYTNALEWENPYYSGEKGWQYTSSEYMKGI
QGRVDVSVWY
>orf02791
(SEQ ID NO: 1585)
MHKNFVVVVTDFFTAVQFIQFNKEGTTCHNTTKFFNHLDSCLNSSTCRQKVIYNKNTLTW
LNGIRVHSQGIDTVLFFIVSRNNFAWQFTWLTNRRKTNSQLKGNWTTHDKSTSFRSHDHV
DFLVSSILNDFTNSVAISISISHQRTNITEGNAFLWIIFNCCNVIF
>orf02795
(SEQ ID NO: 1586)
MEINEQTRKLAVSYSKYSFEVADKTDEVSNHTYGKATLTWFEEIFEEYKEHHNIDV
>orf02801
(SEQ ID NO: 1587)
LHKTLENIGEFEEDNLYYSSMTKAETRISFPIFSLILHYI
>orf02803
(SEQ ID NO: 1588)
MLNRQVCFCFVNHISPLNVVIWENLSLEELLYAICICFITHKIAKQTSLTIDNAGIAMNN
IR
>orf02808
(SEQ ID NO: 1589)
LNSRFFYTDFFKGRQAKGCSFSCTSLSLTDNILAFKGQRNSLFLDRTSFYKTSFFNFC
>orf02821
(SEQ ID NO: 1590)
MRFLADQDRIQHHRYSWALFDKVQGLLSHTDSREKTNLNSPKFHIT
>orf02822
(SEQ ID NO: 1591)
MLKNGIISWKDFKSFFCQGCQTSHCYKPMQAVQGIGSQIS
>orf02825
(SEQ ID NO: 1592)
VTAHRIFGTSSIHNKLIGLAMFGITAMKIICHKLNRNHINIFRRLGIQGKTEFLLIHLIR
QVKMNDLSQGMNPTICPTSTVNSNGLPFI
>orf02829
(SEQ ID NO: 1593)
MLARSKNCFMKSLSIFLLIFYFFDSYQISKKRRSLIGL
>orf02840
(SEQ ID NO: 1594)
LEVCIHHHHQISCRILQACIKGCFFAKISRERNIMDCRILLPIGL
>orf02847
(SEQ ID NO: 1595)
VDRTDEVSSKHCFEVVDRTDEVSNHTHGKATLTWFELDFRRV
>orf02893
(SEQ ID NO: 1596)
MIAEFIDGLQKFHFLQNALITAIVVGIVAGAVGCFIILRGMSLMGDAISHAVLPGVALSF
ILGLDFFIGAIVFGLLAAIIITYIKGNSIIKSDTAIGITFSSFLALGIILIGVAKSSTDL
FHILFGNILAVQDTDMFITMGVGAAILLLIWIFFKQLLITSFDELLAKAMGMPVNFYHYL
LMVLLTLVSVTAMQSVGTILIVAMLITPAATAYLYANSLKSMIFLSSTFGATASVLGLFI
GYSFNVAAGSSIVLTAASFFLISFFIAPKQRYLKLKNKHLLK
>orf02913
(SEQ ID NO: 1597)
MYEEPEVAPVHPTGPTPATETVDSAPGFEAPQESVTIL
>orf02945
(SEQ ID NO: 1598)
MGNNGQFTFGYRHDFFQNQLAIFNALVDTFTRRTIDIKTLNTFINEVLNQGTRTLWTYFS
LLIITCVEGWNDTFVFFQI
>orf02948
(SEQ ID NO: 1599)
LTKIFGWILRIAVLAADVYGNFANNIAVAWDAHDKIPNNGRINF
>orf02974
(SEQ ID NO: 1600)
LSTRNKYCKNLIIFESTFNILDIVKKDLKLNSKLEKDLKY
>orf02976
(SEQ ID NO: 1601)
MSYFRNRDIDIERISMNRSVQERKCRYSIRKLSVGAVSMIVGAVVFGTSPVLAQEGASEQ
PLANETQLSGESSTLTDTEKSQPSSETELSGNKQEQERKDKQEEKIPRDYYARDLENVET
VIEKEDVETNASNGQRVDLSSELDKLKKLENATVHMEFKPDAKAPAFYNLFSVSSATKKD
EYFTMAVYNNTATLEGRGSDGKQFYGNYNDAPLKVKPGQWNSVTFTVEKPTPELPKGRVR
LYVNGVLSRTSLKSGNFIKDMPDVTHVQIGATKRANNTVWGSNLQIRNLTVYNRALTPEE
VQKRSQLFKRSDLEKKLPEGAVLTEKTDIFESGRNGKPNKDGIKSYRIPALLKTDKGTLI
AGADERRLHSSDWGDIGMVIRRSEDNGKTWGDRVTITNLRDNPKAFDPSIGSPVNIDMVL
VQDPETKRIFSIYDMFPEGKGIFGMSSQKEEAYKKIDGKTYQILYREGEKGAYTIRENGT
VYTPDGKATDYRVVVDPVKPAYSDKGDLYKGNQLLGNIYFTTNKTSPFRIAKDSYLWMSY
SDDDGKTWSAPQDITPMVKADWMKFLGVGPGTGIVLRNGPHKGRILIPVYTTNNVSHLNG
SQSSRVIYSDDHGKTWHAGEAVNDNRQVDGQKIHSSTMNNKRAQNTESTVVQLNNGDVKL
FMRGLTGDLQVATSKDGGVTWEKDIKRYPQVKDVYVQMSAIHTMHNGKEYIILSNAGGPN
RENGMVHLARVEENGELTWLKHNPIQKGEFAYNSLQELGNGEYGILYEHTEKGQNAYTLS
FRKFNWEFLSKDLISPTEAKVKRTREMGKGEMGKGVIGLEFDSEVLVNKAPTLQLANGKT
ATFLTQYDSKTLLFAVDKEDIGQEIIGIAKGSIESMHNLPVNLAGARVPGGVNGSKAAVH
EVPEFTGGVNGTEPAVHEIAEYKGSDSLVTLTTKEDYTYKAPLAQQALPETGNKESDLLA
SLGLTAFFLGLFTLGKKREQ
>orf02978
(SEQ ID NO: 1602)
VDKTDKVSSKHRFEVADRTDEVSSKHRFEVADRTDEVSSKHRFEVADRTDEVSSKHRFEV
ADRTDEVSSKHRFEVADRTDEVSSKHRFEVADRTDEVSNIYTARRS
>orf02989
(SEQ ID NO: 1603)
MSCNCAFYRSQFFDVNSVSNYHSHQKELRFPNSILFTYFVKVT
>orf03007
(SEQ ID NO: 1604)
MTVKHRIVNSNGEARSGESLTTCGTRSTHGNWATVGYVYAADMARQNWWDLSAAISGSWS
PN
>orf03009
(SEQ ID NO: 1605)
MRWDYGQIFKEIRKSKGLTQQDVCGQVIHRTTLTNIEHGKVIPSFENMVFLLEQIDMSLA
EFKYICNEYHPSKRRDIIVESQNPSTFQDTRKMVELTEKCQKYLKTHHDVPIQNIYRHTK
IVTELRTKGFKNNHVLKDLYEEIWDYLEPMDTWYISDLKLLGTILFFFPSENLPLLIDRI
MKTIEKYKYFRETKAFLSSFLANLSTVYFQHHLFKECETITLQLLVLAEELKIYDILGFS
QVRLGILQHNSDLIDKGITLLRLTKEEALVKILEKEINDFSNL
>orf03014
(SEQ ID NO: 1606)
VGLIKLTSYVFVCISNSFLTRHDKNDNICFFHGNFCLVLDLFHERSIDIINSSCINHAKR
TIEPLTRCINTVTCHSFDIFYNGDSLTSDPIK
>orf03016
(SEQ ID NO: 1607)
LSSKSCIDRTNQETFHTLGLEGVGMKSGSLFCSVQISDKEKENSRLANGFLRYQFIQGIF
LLLTSYHNHRVGLEILPR
>orf03049
(SEQ ID NO: 1608)
MTESYTWVEADRATLSRYRHGQGHLTDQFFSFKVQRPAAKTLIASISTGKGMGPSFDGTP
VITSGNQNRINTIKNSFIMSSSSVRISLRKLTSQRNFLRNLSSLILLAAQVAKGDATACS
HQRISRVVGQDSHETLSLTEFF
>orf03050
(SEQ ID NO: 1609)
MNINNEKVWFAFYLLDMQITRPTPTFNDRRIGLIGKLQELRFLAGNLLLR
>orf03051
(SEQ ID NO: 1610)
LIKGYLPNHLALMDLCSKTTCTLDDFAGIAGRRNHRGFFCHIGNGVFLTVDKYLRNQRIR
QRKSSHHILTQLVCHSHTHLFILLQTSLSLRTKERLSF
>orf03057
(SEQ ID NO: 1611)
LIKLTDRNFSDILIKCLIKCFTNLLSNQLMLLPSTLKL
>orf03060
(SEQ ID NO: 1612)
LFKGGVTISRTPLSSEDTVMIDATEVQINCPKKTISE
>orf03062
(SEQ ID NO: 1613)
MIQSENHCSASHSNRDYQSQHDNQGRTCQCFIIVPCHKKGSCSVGEITWNQRCQNGQDKD
HSRCLIKNT
>orf03069
(SEQ ID NO: 1614)
MIARQLMVFFSTNQADTRITNMSIDSLIINNSKDFQSSSHASVSFILTKLVNLLIFNF
>orf03070
(SEQ ID NO: 1615)
MGEPFTHFIDCIDLGINPSYTQVCDRHFTSDIPCTMTSHPIS
>orf03077
(SEQ ID NO: 1616)
LSSDSHFIGIKAFVILILGKSNSIVLRIVGLYQDLTCFFSPTCSTCHLSQELEGSLRRTE
IRQIQGRIRI
>orf03078
(SEQ ID NO: 1617)
MAVHSLGIHMQGQRNIAVGTSIHRPTLPTHDKARITTAIEHENHLLFFNQTVLDSL
>orf03079
(SEQ ID NO: 1618)
MVTGIAVLLISHFMLFINNHDTQIFQRSKDSRSGTNNNLGIATLHLAPFIILFTIG
>orf03080
(SEQ ID NO: 1619)
VKNGYLVPKTCYKTLGHLRSQGNLRYQQNSCLALIQGTLDNLQVNLGLPTSCNPLK
>orf03081
(SEQ ID NO: 1620)
MVNLIPRLGLDLLLIDCLIFQTKQAFSSQTHHFSLLGKV
>orf03082
(SEQ ID NO: 1621)
LGLQTKNNPLNQAIPLTKRHMNPHPNFQHSLKFLRNPVTIGLVRLHQGHIYDNLS
>orf03085
(SEQ ID NO: 1622)
LGNHFCTICSTTYQAILQFIQIWWCQEDKDSIWNLFLDLKSTLNFNFKENIDSLVQGFID
IGQRSSIVVADIFCVFQHLSLTNQLFKFFTSTEEIVNTVHFSRTLCACRHRYRILKLVFR
TLKNLSSNRSFSNP
>orf03092
(SEQ ID NO: 1623)
MKFKNYLFDLYPYFPKGFSLDNREDPDVCSKALYDDLCKMFFDDDSKEKLKITSVCNKCQ
NYGNRDYYTLFIDKDKYLLSSDYIGASIYWAQEAGLNDRIILDHLSISRTIGGHILFPRG
GKLETVNQARGGEKGYYDRFDLTLYAIKEWFVENKNTKIGYAIENYHEWFELFSGDDNCK
NGFENFVEFFKLEGFIYEQNKIIDLIKSDLENNQVVFLDKEDILIASTEEEYIRYMKNLN
IIILERTKKILL
>orf03093
(SEQ ID NO: 1624)
MELSIQLIHDLNTHTTHSTAKMLHNVKAIKNDFSIRE
>orf03096
(SEQ ID NO: 1625)
LKAKLFSQVIVRAKHIHSNNFDATSDSSIVAKKVISNDSLFSSLKNSDDIEIVKILRNEA
HLSLCKSILIPRHNLRKTRKIMFKVKIKEQTRKLAAGCT
>orf03113
(SEQ ID NO: 1626)
VGCSYICHELVANHDHFLFVIVEFLHGTVNTKCEGLQGPVNVINPKFLNCSLNAFFGVI
>orf03114
(SEQ ID NO: 1627)
LLHLWRSIRVVPSNEGIIQIDQNSLDSLRLQAWDCQIIDCFHSKIWYIIFNRHSGSFS
>orf03118
(SEQ ID NO: 1628)
VKGLLLATKLCRTNSHTDNLTRYSNRSICQNDLISHIQLTFKEDEKAIDDIRQKALGSHT
NRYPSNTSSSQQTRNWQT
>orf03120
(SEQ ID NO: 1629)
LWGILGLTLPNLSGIGLLGDLFVGGLKAVAPILVFALVANALSQHQKGQDSNMKTVVFLY
IL
>orf03121
(SEQ ID NO: 1630)
MIGTFAAALVAVLASFIVPIEITLNSANTEIAPPDGIGQVLSNLLLKLVDSPVNALLTAN
YIGILSWAVIFGIAMREASKNSKELLKTIADVTSKIVEWIINLTPFGILGLVFKTISDKG
VGSLANYGILLVLLVTTMLFVAPVVNPLIAFFFMRRNPYPLVWNCLRVSGVTAFFTRSSA
ANIPVNMKLCHDLGLNPDTYSVSIPLGSTINMAGVAITINLLTLVTVNTLGIPVDFATAF
VLSVVAAISACGASGIAGGSLLLIPVACSLFGISNDIAIQIVGVGFVIGVIQDSCETALN
SSTDVLFTAVAEYAATRKK
>orf03124
(SEQ ID NO: 1631)
MKIKEQTRKLAAGCSKHGFEVVDRTDEVSSKHRFEVVDRTDEVSSKHRFEVVDRTDEVSS
KHCFEVVDRTDEVSSKHCFEVVDRTDEVSSKHGFEVVDRTDEVSSKHGFEVVDRTDEVSS
KHSFEVVDRTDEVSSKHGFEVVDRTDEVSSKHGFEVVDRTDEVSSKHGFEVVDRTDEVSS
KHSFEVVDRTDEVSNIYTAR
>orf03145
(SEQ ID NO: 1632)
MKDLISVIVPVYNVEPFISSCLDSLSKQIYQNFEVLLVNDGSTDNSGAICREYADRDSRF
HYFEKENAGVADARNFGIERSKGDYITFVDSDDWVTEEYLSILIETLKEQHSEIVVSTYS
TYNESDGLFYIHVFDSDYYVKNYNSKLLMEELPLLERYDMSFLTSWGILFKRELFQEVQF
PFGRVCEYIGTNYKLFMQVEKVTYINKVLYWYRVGKEGLSNSYSPKMMRDDCDFRLERIA
VLALKGYDVSKYLDQMKFYLKYRHDIAIQRELKENVETRHLEMLDYLLNGNKYN
>orf03148
(SEQ ID NO: 1633)
LNVRGGAYITFVDSDDWLEHDALDRLYGALKKENADISIGRYNSYDETRYVYMTYVTDPD
DSLEVIEGKAIMDREGVEEVRNGNWTVAVLKLFKRELLQDLPFPIGKIAEDTYWTWKVLL
RASRIVYLNRCVYWYRVGLSDTLSNTWSEKRMYDEIGAREEKIAILASSDYDLTNHILIY
KNRLQRVIAKLEEQNMQFTEIYRRMMEKLSLLP
>orf03167
(SEQ ID NO: 1634)
VLAKAEAEALVDADSDADVLADTEAEALVDAEAEALVEADAEALVLAEAEALVDAEADAL
VEAEAEALVDADADALVDADSEALVDADSDALVLAEAEALVDADSEALVLADSDALVLAE
AEALVDAEADALVDAEADALVLAEAEALVDADSEALVDAETEALVDAEAEALVDAEADAL
VDADSDALVDADSDAEVLAEADALVDAETEALVEADSDAEVLAEADALVLAEAEALVDAE
ADALVDAETEALVEADSDAEVLAEADALVEADSEAEVLAEAEALVDADSDAEVLAEADAL
VDADSEALVDAEAEALVDAEADALVLAEAEALVDAEAEALVDAEAEALVLAEADALVDAE
ADALVDAEAEALVDAEAEALVDADSDALVDADSDAEVLAEADALVDADSEALVDAEAEAL
VDAEADALVLAEADVLALVDADSEADVLAEADALVDAEADALVDAEAEADVDADSDAEVL
AEADALVEAEALVLAEAEALVDAETDALVDAEAEALVDAEADALVLAEADVLALVDADSE
ADVLAEADALVDAEADALVDAEADALVDAEADALVLAEADALVLAEADALVLAEADALVL
AEADALVDADSEADVLAEADALVDAEADALVDAEAEALVLAEAEALVLAEADALVDAEAD
ALVLAEADALVDAEAEALVLAEAEALVLAEADALVDAEADALVLADSDALVDAEADALVD
AEADALVLAEADALVDADSEALVDAEADALVDAEAEALVLAEAEALVLAEAEALVDAEAD
ALVDADSDALVDAEAEALVLAEALVLAEADALVDAEADALVLAEADALVDAEADALVLAE
AEADVDADSEADVLAEAEALVDAEAEALVLAEAEALVNAEADVLAEADALVDADSEALVL
AEADALVLAEAEALVDAEAEALVDAEADALVLAEADALVLAEAEADVDADSDALVLAEAE
ALVDAETEALVDAEAEALVLAEAEALVLAEAEALVDAEADALVLAEADALVDADSEALVD
AETEALVDAEAEALVLAEAEALVLAEADALVDAEADALVDAEAEALVDAEADALVLAEAD
ALVDAEAEALVDAEADALVLAEAEALVDADSDALVDAEADALVDAEAEALVDADSDADVL
ADTEAEALVDAEADALVLVDADVLALVDADVLADVLALVDADVLAEAEALVLAEAEALVD
AEAEALVDADSDAEVLAEADALVLAEADALVDAEAEALVDAEAEALVDAEAEALVDADSD
ADVLAEADALVDAEADALVLAEADALVLAEADALVDADSEALVDAEAEALVDAEAEALVD
AEAEALVDAEAEALVDAEAEADVDAEAEALVDADAEALVLAEADALVDADSDADVLAEAE
ALVDAEADALIDADSEADVLAEAEALVDAEADALVDAEAEALVLADAEALVDAEADALVD
AEADALVDAEADALVDAEAEALVDAEADALVLAEAEALVDAEADALVDADSDAEVLVLAE
AEALVDAEADALVDADSDAEILAEADALVDAEAEALVLADSDALVNAEADVLAEADALVD
ADSEALVLAEADALVLAEAEALVDAEAEALVDAEADALVLAEADALVLAEAEADVDADSD
ALVLAEAEALVDAETEALVDAEAEALVLAEAEALVLAEAEALVDAEADALVLAEADALVD
ADSEALVDAETEALVDAEAEALVLAEADALVDAEAEALVDADSDADVLADTEAEALVDAE
ADALVLVDADVLALVDADVLADVLALVDADVLAEAEALVLAEAEALVDAEAEALVDADSD
AEVLAEADALVLAEADALVDAEAEALVDAEAEALVDAEAEALVDADSDADVLAEADALVD
AEADALVLAEADALVLAEADALVDADSEALVDAEAEALVDAEAEALVDAEAEALVDAEAE
ALVDAEAEADVDAEAEALVDADAEALVLAEADALVDADSDADVLAEAEALVDAEADALID
ADSEADVLAEAEALVDAEADALVDAEAEALVLADAEALVDAEADALVDAEADALVDAEAD
ALVDAEAEALVDAEADALVLAEAEALVDAEADALVDADSDAEVLVLAEAEALVDAEADAL
VDADSDAEILAEADALVDAEAEALVLADSDALVNAEADVLAEADALVDADSEALVLAEAD
ALVLAEAEALVDAEAEALVDAEADALVLAEADALVLAEAEADVDADSDALVLAEAEALVD
AEADALVLAEADALVDADSEALVDAETEALVDAEAEALVLAEAEALVLAEADALVDAEAD
ALVDAEAEALVDAEADALVLAEADALVDAEAEALVDAEADALVLAEAEALVDADSDALVD
AEADALVDAEAEALVDADSDADVLADTEAEALVDAEADALVLVDADVLALVDADVLADVL
ALVDADVLAEAEALVLAEAEALVDAEAEALVDADSDAEVLAEADALVLAEADALVDAEAE
ALVDAEAEALVDAEAEALVDADSDADVLAEADALVDAEADALVLAEADALVLAEADALVD
ADSEALVDAEAEALVDAEAEALVDAEAEALVDAEAEALVDAEAEADVDAEAEALVDADAE
ALVLAEADALVDADSDADVLAEAEALVDAEADALIDADSEADVLAEAEALVDAEADALVD
AEAEALVLADAEALVDAEADALVDAEADALVDAEADALVDAEAEALVDAEADALVLAEAE
ALVDAEADALVDADSDAEVLVLAEAEALVDAEADALVDADSDAEILAEADALVDAEAEAL
VLADSDALVDADSEALVDAETEALVDAEADALVLAEAEALVDAEAEALVLAEAEALVLAE
ADALVDAEAEALVDAEADALVLAEAEALVDADSDALVDAEADALVDAEAEALVDADSDAD
VLADTEAEALVDAEADALVLVDADVLALVDADVLADVLALVDADVLAEAEALVLAEAEAL
VDAEAEALVDADSDAEVLAEADALVLAEADALVDAEAEALVDAEAEALVDAEAEALVDAD
SDADVLAEADALVDAEADALVLAEADALVLAEADALVDADSEALVDAEAEALVDAEAEAL
VDAEAEALVDAEAEALVDAEAEADVDAEAEALVDADAEALVLAEADALVDADSDADVLAE
AEALVDAEADALIDADSEADVLAEAEALVDAEADALVDAEAEALVLADAEALVDAEADAL
VDAEADALVDAEADALVDAEAEALVDAEADALVLAEAEALVDAEADALVDADSDAEVLVL
AEAEALVDAEADALVDADSDAEILAEADALVDAEAEALVLADSDALVDADSEALVDAETE
ALVDAEADALVLAEAEALVDAEADALVDAEAEALVDADSDAEILAEADALVDAEAEALVD
ADSDAEILAEAEALVLAEVDALVEADSDADVLALVDADVLALVDADVLADVLVLVDADVL
AEAEALVLAEADALVDAEAEALVDADSDAEVLAEADADALVDAEAEALVLADAEALVDAE
AEALVDAEADALVDAEADALVDAEAEALVLADAEALVDAEAEALVLAEADALVDADSDAL
VEADSDAEVLAEAEALVDAEADALVDAEAEALVLAEAEADVDADSEADVLAEADALVDAE
AEALVLAEADALVDAEADALVDAEADALVDAEAEALVLAEAEALVLAEADALVDAEADAL
VLADSDALVDAEADALVDAEADALVLAEADALVDADSEALVDAEADVLVDAEAEALVLAE
AEALVLAEAEALVDAEADALVDADSDALVDAEAEALVLAEALVLAEADALVDAEADALVL
AEAEALVDADSDAEVLAEAEALVDAEADALVDAEADALVLAEAEALVDAEADALVLADSD
ALVDAEAEALVDAEADALVLAETDALVDADSDAEVLAEAEALVDADVLADVLALVDADVL
ADVLALVDADVLADVLALVDADVLADVLALVDADVLAEVDALVDADVLADVLAEADALVD
ADSDAEAL
>orf03175
(SEQ ID NO: 1635)
VFEVVDKTDEVSSKHCFEVADRTDEVSLKHCFEVADRTDEVSLKHCFEVADRTDEVSNHT
YDKVKLTWFEEIFEEYHTKKPCSSR
>orf03178
(SEQ ID NO: 1636)
MYQDLLRKIAEEKPNYNQEEIQWLLDHLGDPSPEIRDDLVFTSFARGIQEELFTQEQFHF
IAEGVSSDGGLDKEIDKIGLPTLERSFRALIYATLLSDDANQQSIFYQRLKAEIRNVLLN
QGLHYLSKEKDTTGFSSQYGWVHSFAHGADLLKEVVCHPDFPKNRVHEVFDILGQLFKRM
SIRFTDDEDWRLARVIYEPILQGKLEQEQVASWIKTVDFPIEEREDFSKFSNFRSCLVEV
YVQLDQRNSLQDELKEAIQSFQY
>orf03181
(SEQ ID NO: 1637)
MGFKVSHFKIPSSHLSINVLRTIENFTEIGQGLLHISP
>orf03182
(SEQ ID NO: 1638)
VGFFDFGLTNSCRQVRQFTQTVQDFLVCYHQGIVKEGQGYAGICFKFHPSLGNIGKFVIA
IVRRLRHKSIVANMAHLNVDLFQFRKGLLEILKSVKIALVITAKLVDVFTSFLDCTQEIL
TVLV
>orf03190
(SEQ ID NO: 1639)
MNITYIVGNGLDLQYGLKTRYRDFYEFQNKVYISRTENEEKYSNFIYESLFSDKVNDYEN
WSDFELSIGKLTKDNDLISSSIEIKEKFIDDFSEVVDDLREYLRIQQEKNLEKGNAIDFI
STLDDMRTSLPVINQPAIDKKYNENPHQDDIVNIVTLNYTHVIDKLYNGSAKSFRNQLRA
NLYNFYIEPPIHAHGTVDVCTVLGVSDEIQISNSLEEQKESLIKSLVLKNYRENMDVKNS
DIIKNSDIIILYGVSLGETDRYIWSQIAERSISGSVPVIIYHYVPHFDPGNPIRAKRLYR
NVEDKFIQNSGIDLELEKKLRDNLIVVIGKTIFDLIER
>orf03191
(SEQ ID NO: 1640)
MNTLLTLRGKSFTQKSRNNGMGPITIPKKTIITLEHLKYLHFSLEETKTYWEKNNIIDGI
LISIYYNRIVAKSNRINGYFNVGGGNPFPNDTIVGAKFNDEKTKHIVTHYISRDALNKTI
TVLSKIIEVFEEHFDRAITCEMFSDSSTFASINFSEYGISKSKFQQYLRDSCFIENFGVE
HTTVSDIQNSIVTFYDVHTDIFRLLNKLNIDISEANIMNQTTVLLDEKNIELLLSKAPYL
VSMIVEDFSKLSVDDFSLDNNDLKINLPSPMNEPVVGVIDTLFDKRVYFNEWVEYHDFVS
PDISKDSQDYKHGTAVTSLIVDGANLNPNLDDGCGNFRVRHFGVSLQSGFNSFTIIKQIK
EIVSQNADIKVWNLSLGSNDEIRENFISAEGALLDEIQFENDVIFIIAGTNASVINGKRK
RIGAPADSLNSIIVNSVDFNNQSVSYSREGIVLSFFVKPDVSYYGGGNGDFINVCEPLGL
GRVAGTSFAAPFIARKMAYLIHIMGLSREEAKALLIDAAIPWNDKKTFTDLSLIGNGIVP
IKMDDILSTPDDEIKFIVSDISRAYDTYNYDFPVPISSESYPYVAKATMCYFPNCSRKQG
VDYTNTEMQLTFGRLKSDGIKSINKDNQHAEDTPGYVRENAARNIFRKWDNVKHIGESFT
SRKRAKAILNPSNPQWGMSIKTIERLKSGDGQGVRFGVVVTLKELNGVNRIEDFIQQAEL
RGWLVNRLQVEAQVDLFNSLNEEIEFE
>orf03192
(SEQ ID NO: 1641)
MKKSDVLDLIKYHYEGRETEFRNQSIAIARNFNKHGDTQIAQYIMGLMSQSDRFMPQIEN
PSEYLTPAKLDIGPLPLPLSIMNDLKGIINAVNHHIGINKFLFVGSPGTGKTESVKQVAR
LIGKELLVVDFSHLVDSKLGQTVKNLATLFNEINNLPFKQNYIILFDEIDSIVLDRVNQN
DLREMGRVTSAFLKELDRLSPEIVLIATTNLFENLDKAVTRRFDAIIDFDRYTDEDKVEV
ATIILNELLKQFKNVARDLKLFKKIINSANVIPNPGDLRNSIRTSLAFSDPSDPHDYQKR
LLRSLHNGRNLSISKLSKLGFTVREIEILTGISKSSVSRELSED
>orf03200
(SEQ ID NO: 1642)
MINSQVFEIRIFNSYYKDAIYYFKNINYSIFHIFSTHY
>orf03205
(SEQ ID NO: 1643)
VGHRFDPCRGHLNTTGKALEPRFFCLNKIFFKFFRKLA
>orf03206
(SEQ ID NO: 1644)
MGWKGTPPCLHPSNQDTTILIVQQCLRRIEVLAMINFLN
>orf03207
(SEQ ID NO: 1645)
VFGSYYRVIASIFFKEFWITEISSNQLIWQVCSSYNWILGNLFKVNPVI
>orf03208
(SEQ ID NO: 1646)
VLPSHQVLTFSMSPVHRSPNTIIWIELIKEMVFSTKINKSIWIIDPTNLS
>orf03219
(SEQ ID NO: 1647)
LLRFAIHSNLLFLKRFIFSIKDSAWRCLFISFFETFHFCFKNKSFYLNSFYH
>orf03230
(SEQ ID NO: 1648)
LIVSLKTKSRKAKDMAESIQGWLAQFLVNLFKSITFDCGKEFSKWKDISNHHDSESFFAN
LECPRQRCLNEHSNRLLRCHDLPKQTDFNEVSQEF
>orf03231
(SEQ ID NO: 1649)
VVEIIYFLIIIIASGLGSISGMGGGIIIKPLMDSFGYHSVSDIAFYSSFSVFIMAIISTT
KRFSQSKEIKWRLIFTVSFSSVLGGFLGHLIFQVLLSQLSVRLVSIVQMILLFVMLLVSF
VLTDFKKTYQFDKIGFYMICGLLLGLISSFLGIGGGPLNVSLLMVFFSISIKEATMYSLA
IIFFSQLSHLATIVVVTGLNQYHLAPVPVIFLASICGGVLGTVVSKVLPENWVRYCFKGM
LFFVMGMTLYNLFHIL
>orf03232
(SEQ ID NO: 165)
MMGTNSEEGFLDDFEGPQVAVSVKDFSIADTPVTNQEFAQFVKETGYKTLAERQEWSFVF
ILFVPEAEREGYPHPAGAPWWLQVSNACWKHPYGENSNLVGLEDHPVVHVALEDALAFCN
WSGMSLPTEAQWEYAARGGRQSEYPWGDTLLEGGYYHANTWQGRFPYENTALDGFIGTAP
VYEFLPNDFGLYQMIGNVWEWCRNPRYTLLASFNEDDYELPKYGIQDEEYAIRGGSFLCH
CSYCNRYRVAARNGCISTSTSSHLGFRCLKE
>orf03235
(SEQ ID NO: 1651)
MVQTKQPNIILIVVDQMRADALSLNSKDKLVSTPTLDMMASVGYNFENAYSPVPSCVPAR
AALLTGLDQDKSGRVGYQDEVPWNFTNTLPKVFKDMGYQTECIGKMHVFPSRQRLGFDHV
LLHDGYLHVDRKYDKAYGSQFDYASDYLAFLKGKVGYDVDLIDDGMDCNSWEARPWDKDE
KLHPTNWVVSESISFLQRRDPTVPFFLKMSFEKPHAPLNPPKYYFDIYMERLPQFLDLHI
GNWEVLEKQIPSIYALRGKLKEDDQRRMVAAYFGLITHIDHQISRFLTALKEFRHDKDTI
IWFVSDHGDQLGEHYLFRKGYPYQGSIHIPSFIYDPAGLIAGNRGTIKQLVKIQDIFPSL
VDLAGGTTTDELDGRSVKNLLFGQYEGWRTEFHGEHALGKDSSQYILTDQWKFIWFPVLN
HYQLFDMKKDPHEMNDLYPSEKYQPIVRQMKKKLVDFLRYREEGFVVDEELVPVELSKIT
PTLTKTGDSQS
>orf03237
(SEQ ID NO: 1652)
MNTMLDKMQEKLSPIAMKVGNQKFLVALRDSFVGTMPVIMTGSIALLLNAFLVDLPQQFH
LESITKTFQWLVDINNLVFKGSIPIVSLLFIYCLGVNIAKIYKVDTVSAGLVSLASFVIS
IGSTVTKSFPLANVGDVKLDQILQGIDNLAFDGKNLMVTIGNVIPGNHINARGYFTAMMI
GFLASIIFCKVMKKNWVIKLPDSVPPAIAKPFTSIIPGFMAMYIVAILTYVFHLLSNDLL
IDWVYKVLQTPLLGLSQSFFAVILMIFLNKLFWFFGLHGGNVLAPIMEGLFGVAMLANLD
AFQKGEPIPYIWTSGSFGAFVWFGGLGLVLAILIFSRNSHYRKVAKLGLAPVLFNIGEPV
NYGLPVVLNPLLFIPFVLSPVFMATVAYWATSWGLVSPVTQNVTWVMPPILYGFFSTAFD
WRAIILSVVCLIISVLTYFPFVKMADKTELS
>orf03238
(SEQ ID NO: 1653)
MNESNLESAMGLIMYGGEAKSNAMEAIQAAKKGDFSKANRRLADANAALLQAHKAQTEML
TREAQGEETSISLLMVHAQDHLMTSLTFVDLAKEVVEVYERFEKN
>orf03239
(SEQ ID NO: 1654)
MAKVTIMLACAAGMSTSLLVTKMQKAAEDKGLDAEIFAVPAPEAEEIVATKEVNVLLLGP
QVRYLLGDFQEKLKDRQIPVAVIPMTDYGMMNGSKVLDLAESLLD
>orf03240
(SEQ ID NO: 1655)
MKRLISANPSEILQMNAEELKQSILASEGRVVLSENVVTRETFVGDITNSEIARAFGADM
ILLNCVDVFEPKIYALDSSGDDVIHRLHQLVACPIGVNLEPIDPSAKMLEETQEIVAGRV
ASVETLKRIEELGFDFVCLTGNPGTGVSNREIIKAVQTAKENFSGLIIAGKMHGAGVNEP
VAELSVAEQLLEAGADVILVPAVGTVPAFHDQELREVVDLVHSKGGLVLSAIGTSQETSD
TDTIKEIALRNKICGVDIQHIGDAGYGGLATVDNIYALSKAIRGVRHTVSRLARSVNR
>orf03241
(SEQ ID NO: 1656)
MEKLLQEKLLPVAARLGNNKALVSIRDGITLTIPLLLIGSLLMVIASFPIPGWEQYLGDI
GVADYLWKGVDSSFGLLGLVASFGIAYFMARQYKVDGIPAGIVSLSSFITVIPFIRGEAG
AGMPTAFMASKGLFVAMILGLINGYIYQWFINHNIQIKMPDGVPPAVSKSFSAIIPGAVT
IVGWLIVYATLDKLSLPNLHEIAQVALGGPLGLLGNNVIGLLILIFLNSSFWFVGLHGGN
VVNAVMKPLWLANLDANKVAYQTGETLPNIFTSVFMDNFVFIGGGGATIGLVLALGYLAH
KKKASKQLKTLAPITVIPGLFNINEPAMFGVPIVLNILLLVPFILAPMFNLLVAWGAMAS
GLVPLTYTDPGWTMPPVISGLLATGSISGSLLQIVLIVLDVLLYLPFVIAIEKRFKLLED
>orf03242
(SEQ ID NO: 1657)
MTLSKKQLQLRAKILETVYTLGPISRIEIATKTGITPATTSSITNDLIKENILLELGEDE
HDTSVGRKKILLDIQAKRFYYIGCELSEKHFTFALGDNLGNILKEEKEIVTKQLIQEKGN
QLINQTLKQFLNNCSDYEIEAIGIALPGRYLDDYKITTNNPLWQHIDLEMIQSHFDKPLF
FSNNVNCMAIGKRLFSRQQNDPNFAYFHFARGMHCSYIYDGNIYGKGNLMIGEIGHTVVS
SEGEECSCGRKGCLQTFAGESWLIKKSKILYHQSPYSLLPSLVKNADDIDIQVILTAYQL
GDTGIITLIHQALLYLSQTILNISMMIDSQKIYLHSPLLTNQHIIQKLYSEMNYKPKLLY
NRLPEVIIEPYNDFTAAHSAIALCLYHTILHS
>orf03243
(SEQ ID NO: 1658)
MTIRFEEKVSTENAQFVCQWSNSLGKVFQEQWIGPRIPFPLTIQVFQDLEGILSIFEGQE
FVGLIQKIRLEDSNLHIGRFFINPQKQGQGLGSQALRKFVSLAFENRDIDSISLNVFEAN
QRAQNLYQKEGFEIV
>orf03261
(SEQ ID NO: 1659)
MPFKENLICQHRNHHCSVFFISLGLLHNIHIEIDISQTRASFLDLSDYLQAVLMILQKFC
QAIGLAQRLDLLQLHLLHLTRLLL
>orf03271
(SEQ ID NO: 1660)
MYLLLLVVKDHIALIDKEMHVWRPNCILRDLTNFFIKRNHIVTHKTNGSTTKR
>orf03272
(SEQ ID NO: 1661)
VLTLMNHFIKEIQGIPINHLTILIENSIFKLNLKNWIIG
>orf03274
(SEQ ID NO: 1662)
VDRTDEVSSKHCFEVADRTDEVSNHTYDKATLTRFEEFFEEYKGVPR
>orf03293
(SEQ ID NO: 1663)
VCQRMDARTCKTTIIAVHNVLTALQQTWIAVQLYQTK
>orf03294
(SEQ ID NO: 1664)
LHLGKSILSLPVKGKDLEFLVHLFVINHWIGFPSRTSTFCRCKVLNSME
>orf03295
(SEQ ID NO: 1665)
LEQTVIIANNPCELYWDNHLSFLSDSLLKQVIVHLKRICLDIHHDRGCSHVRNDTT
>orf03297
(SEQ ID NO: 1666)
LTDDGVLILVVDAGWRGNSCLQEQGCHHFRAILLCITWHFRSCTDKGHLTFKDIDQLRQF
VQTDTSDEISNLGNTAIVSRSHQTSFFIRIRHHGTELPNLEPTVVLGHTLLLVNHWPLAI
QLDPNAQDEKDGRS
>orf03298
(SEQ ID NO: 1667)
MLKMRKMGEVRTSKTKAKTQSKQRLKISEPFLLETSW
>orf03313
(SEQ ID NO: 1668)
MLEEGTKDQLAELTYPFGRGVNLSFGIKDVPKLYQKVMEANYPIYRLLTKRKFRVSDPYI
YPHKFAVLDPDGYFLRFSE
>orf03316
(SEQ ID NO: 1669)
MDQNLFNYNDEDIDSVIEYSHKLLNRKFSDVMEEYNRSLYKSYDDYNDRVVSEVQDKAIS
MKSKGQYGNYIEKYFYGYQPNSDSEADFEKIGVELKVTPFKINKNGTLSAKERLVLTILN
YMEENLEDFYSTHLWKKCAKILLLFYNGLIPNQTMKDYVIEKIFLYEWFEEDMAVILEDY
QKITDKIKNGKAHELSESDGNYLSTCTKGAGKGKDLRQQPFSHELAKQRAWELKSSYMTY
LINHKIFNQSDQESVLANFRGEKKSFTEVIAEKILSYKGFSEQELYDRFEVNSKAKGKNS
TLIRKILGLTGDLDKTKEFQKANMNLRVIRVDKNNLPKEDSPFKTYCFKELAATDSWESS
HVYNEIYNKRFLFVIFKEIEPKLFVLDSIKFWGFQDRQLEEIQRVWQETRQIISDGVKLT
QNGNKVSTNFPQSKINKILFTKLHATNTYYEIDKGKFVGKGSLSDTDELPDGRRITKHSF
WMPKKFIKEILDGNWD
>orf03317
(SEQ ID NO: 1670)
MKVLELFAGVGGFRIGLENADKQLFKTKWANQWEPSRKSQDAFEVYDYHFPNSKNINISI
SDITDEQFSKMDADMIVGGFPCQDYSVARSKKNEKGIEGKKGVLFWEIIRATEIIKPKYL
ILENVDRLLKAPSKQRGRDFAIMLTAFNNLGYSVEWRVINAAEYGRSQRRRRVFFFVYRN
DTVFAQKIDNLYEKNEEIFEDNRYDDYIFNQGLFAKQFPIKPIAVKNRHVFYELPNDIVE
VSDTFTGTVWNTGIMRRGKYYSIDTEPNYNGNPITLGEILQDESEVPEKYFLTDQSKLEK
FQYLRGPKKIERTSSDGHQYIYSEGGMSPYDDLNLPGRTMLTSEGTVNRSTHLLFVNNKY
RLITPIEAERLQDFPDDWTAKKKLSDDSIVEVSDKMRMFFMGNALVTEIVKEIAKFIKEI
D
>orf03318
(SEQ ID NO: 1671)
MDTFSFNGQYIVEFSCLKVVDRGLECHPIKSQRDNHQTTDLVT
>orf03320
(SEQ ID NO: 1672)
MGIAIVVERRVHYFGRHHNVTISHFFNFVIFKGRYSVKMKVFHRFLLIFQTTL
>orf03333
(SEQ ID NO: 1673)
MIACRHDICKSQKGLEHPFCIIRRLTRDFNQRPVCIVEANIFCLKITPQIITNMIVARTV
KSSKTGITLTTSMCKRDNHKITWFHRRNGFPSFFNNPNRFVSTIFMSSFRFWITVPP
>orf03341
(SEQ ID NO: 1674)
MLRQFRLGFFDVRMTECHLKWKERENFHDFLKFYCKDS
>orf03350
(SEQ ID NO: 1675)
MNMNKDQIAILNGADNLNLTLWMTLKEICKEGCKSFFPVRNTCRMLDIGIPYRLGLSLSN
SSVLNGMDV
>orf03370
(SEQ ID NO: 1676)
MHKLRIFVNQLCRRFGIILGPFLVLGFQVLTQELELAIFFDLREEVLLQVIPQVCHFCYL
RKEFTTLNQHELTSHDHVLTRHFQTHGLQG
>orf03382
(SEQ ID NO: 1677)
MLHMNLFFQPFFTNLCKTLATGCCVKTVMEWSSIATTIDFKIIE
>orf03383
(SEQ ID NO: 1678)
LDNRAKEWIMSTAQNQAIHLSNQGTQGFIDHLLGNTG
>orf03385
(SEQ ID NO: 1679)
LSLDFFPDDRSRSVTSNDNHFDILGQEKVDQLPSIFTNLLSRTGAIGRPRRISNIDDFFM
GKLAHELAHNGQAPDTRIQKTNWSIIHTVFFLVFFLIDRSL
>orf03394
(SEQ ID NO: 1680)
VSYGSHIFFASNCLKQIFGFLFKFSHLILLILVKASLI
>orf03397
(SEQ ID NO: 1681)
MTSLLTLENIHKTFEAGTVNENHVLKGLDLEVEEGDFISVIGGNGAGKSTLMNILAGNLS
VDEGDLLLAGKSIKNLSVRKRAKDIARVFQDPKMGTASRLTIEENMAIALRRGQKRGLGW
GVKEKDRIQFQEALKELNIGLENRLKVDTQYLSGGQRQALTLVMTDLMKPKLLLLDEHTA
ALDPKTSQMVMDLTQKIVEHHQWTTLMITHDMNHAIEYGNRLIMLYQGKIVVDVKGEEKK
HLTVEDLMHLFQKNSGQSLVSDELVLG
>orf03398
(SEQ ID NO: 1682)
MNFVLSSLSEGLLWSIVAIGDYLTFRILDIADMTAEGAFPLGAAVVVSQIQAGANPWLAT
LLALLAGMVAGLVSGMLHTKMKIPALLTGIVTLTGLYSINIKIMGSVPNLSLGDSATVFK
QLASLGLTNEGAVFSLSLVCFLLVCLVLTLLMKTEIGLVLRSTGDNIPMSEANGVNVDTM
KIVGYMISNGLIALCGSLFAQNDGFSDVTSGTGTIVVGLSSVIIAEVLIHDLTIGGRLLS
IGIGAIVYRLIILNIYEIPNLDQNLVRLFNAILLALVLFAPELQKRLKIRGLKLRNE
>orf03399
(SEQ ID NO: 1683)
MAEVDMVFVPTDNIILSTMETVKQVSIKHKVPVFGGSTEMIAVGGLYNYGTNYEELGRQT
ARMLIRVLKGEEPENIAVELPEKLELHTNQEMADALGIDISKLEGKE
>orf03400
(SEQ ID NO: 1684)
VDELAKQGYVEGENIEIDLQNAQGEQRNLKTISQQLAESSDVVLAIARPSAQSLANTTQT
TPVIFSAVTDPVSAKLVESREHPGGNVTGTSDQSSDAISTQINLIKKVLLKAKTIGILYT
QSEPNSVV
>orf03401
(SEQ ID NO: 1685)
MQTDQRSQEEPHYQEGASDFRTTFIMKLLLRKDKTKNRLDTI
>orf03402
(SEQ ID NO: 1686)
MLPILSPFSSPVNNISEFFKIFRKFFQEAFKVFQISPTKKVL
>orf03412
(SEQ ID NO: 1687)
MINVNQVSIEVKNTFKNWNFTSSIELTTFSKFSQSPTMT
>orf03414
(SEQ ID NO: 1688)
LIDVLFINSFIGRICFYCYRRIHATCLFLQLFSIVILNVAHTLKHSIFIVITFISRCRNF
IIVRILLENQFSRNQGIDNRVGQSRY
>orf03423
(SEQ ID NO: 1689)
MKIKEQTRKLAAGCSKHCFEVVDETDEVSNHTYGKVKLTWFEEIFEEYKKSSWNL
>orf03442
(SEQ ID NO: 1690)
LVEQLTFNQWVTGSSPVRVIYAGLAELADAPDLGSGA
>orf03443
(SEQ ID NO: 1691)
MSIVKSHSFSISLGIFNSFWNNIHTSECFNFLCKGKSNRSNSTISVNQMVFFINIQRFYC
FAIEDFCLLRI
>orf03444
(SEQ ID NO: 1692)
LNTLLPPDNLCLFTIYLTGFSCICINSYCHNFWEIFNQLFYQLS
>orf03451
(SEQ ID NO: 1693)
MGFSMKLIHDLNTHTTHSTAKMLHNVKAIKNDFSIRE
>orf03460
(SEQ ID NO: 1694)
MYNKVILIGRLTSTPELHKTNNDKSVARATIAVNRRYKDQNGEREVDFVNMVLWGRLAET
LASYATKGSLISVDGELRTRRFEKNGQMNYVTEVLVTGFQLLESRAQRAMRENNAGQDLA
DLVLEEEELPF
>orf03464
(SEQ ID NO: 1695)
MQFTRTAHHTKTLFTTKFTWENEIPFWHHSSRKRDNGFQPHTRIGSSCNDLYSLITCDCN
LADVEVVTIWMGYHLNNFTDNKLRFLIINNFFCKTFRLQLLVQTSDLLICQKDLTALCSF
K
>orf03469
(SEQ ID NO: 1696)
MILDSFFAFNCSGTMKVSTWVYDKGEWYYVSSSGSMIANDWVKDNGK
>orf03476
(SEQ ID NO: 1697)
MCTSINKKKKAVKPSFDLFFCFIFCKLTIVQVSVEATLRHQFLIVALLDDISIFHDQDQV
CISDG
>orf03484
(SEQ ID NO: 1698)
LHLRTCFVRQTNKLSPLINRTRLQFHQTILHYTLNQITSNRLGNIEFLIDIFNQDQVLVF
LAIIQKMHNLTLRPTHKFNAATFGFLLHHQVNLMTKTLKD
>orf03499
(SEQ ID NO: 1699)
MLEIWKYRPFVSEFWNDFKNNHDKQFVDSISLYLTLKDDDDPRIEEESEALENMILQYLG
EDDAS
>orf03507
(SEQ ID NO: 1700)
MAFNQFNRCIGLSIPTAPNVPGTIINRSYLHDATVPNNVREKT
>orf03523
(SEQ ID NO: 1701)
LTDFHDFKFIFFENLFKSRQLYLQSQNTVLSNLWLAT
>orf03533
(SEQ ID NO: 1702)
MKIMKKKYWTLAILFFCLFNNSVTAQEIPKNLDGNITHTQTSESFSESDEKQVDYSNKNQ
EEVDQNKFRIQIDKTELFVTTDKHLEKNCCKLELEPQINNDIVNSESNNLLGEDNLDNKI
KENVSHLDNRGGNIEHDKDNLESSIVRKYEWDIDKVTGGGESYKLYSKSNSKVSIAILDS
GVDLQNTGLLKNLSNHSKNYVPNKGYLGKEEGEEGIISDIQDRLGHGTAVVAQIVGDDNI
NGVNPHVNINVYRIFGKSSASPDWIVKAIFDAVDDGNDIINLSTGQYLMIDGEYEDGTND
FETFLKYKKAIDYANQKGVIIVAALGNDSLNVSNQSDLLKLISSRKKVRKPGLVVDVPSY
FSSTISVGGIDRLGNLSDFSNKGDSDAIYAPAGSTLSLSELGLNNFINAEKYKEDWIFSA
TLGGYTYLYGNSFAAPKVSGAIAMIIDKYKLKDQPYNYMFVKKILEETLPVKNGIKVLNI
PNVLRYDLNMLQLEYKNEQSWDSFIDNVNLIELEERIQTTIGIKQINTHNIITIAREGYS
QNYLPNTSENTYNSLQVSLVGVLLLFISMVNILWAKKSK
>orf03543
(SEQ ID NO: 1703)
VLKWCILRINHHISRKVDNFLEGTRAHIKGQAHTAWNPLEVPDVRYRSFQFDMSHTLTTN
FRTRYFNPTAVTNNSSVTNAFVLTTSTFPVFCRTKDHFIKESFTFWFQGTIIDCFRFFDF
SIRP
>orf03553
(SEQ ID NO: 1704)
MPWKELCHKLAPKVFKVIRIYSRENKKSPSNWAFCSFET
>orf03559
(SEQ ID NO: 1705)
VSVLFFCSYFSLSLEKGWFSSLISCKFMNQFLPFCWRQDSPWILTLAQDSITYH
>orf03564
(SEQ ID NO: 1706)
VTDENTRKVRLLVAFFSIVIGYILSSFFISLYHLWQEALRGLL
>orf03566
(SEQ ID NO: 1707)
LHVELIDSHKFNIGRTTCSLLSTTNICKRCQPSINHMS
>orf03567
(SEQ ID NO: 1708)
MLNTNRNELIGTSFLIFCVIYFKDLANIFRTTWNLYIIRQGHYKCQESHNQGRNDV
>orf03570
(SEQ ID NO: 1709)
VNKPILSDIDCHLTNSINLFLPDTQTGNLFWKFNGLIRLAHNHNIFRKKLSLSHFFNICY
DLFLGIGRV
>orf03571
(SEQ ID NO: 1710)
LKFSNFLGHLDIFSHDGLSLTVSLHQNSTGHATRYCFDR
>orf03584
(SEQ ID NO: 1711)
VDSLFLSLGEESNQEINLQESFSSTDCNPTLISPETTVAQGLCQDIIYRPFT
>orf03586
(SEQ ID NO: 1712)
VNPKSLGSFFLQDSKGFKELVLGHAKLSLPRIVHNVCPQFKNASRIITTRDDFWNACYSL
QMFNIFKGIQVNGRTQFTCIGVFLVWRVVGREHNLRTQKVQFMAHQKLYITRAVHTTTFF
LENFQNSWSWSSLNCKIFLKALVPRKSLVDGSCLLTNPLLIIQVKGSRELGNNRF
>orf03590
(SEQ ID NO: 768)
MDNLCLHNTWTDWTSIFKQAVVTEDDMTKQNDFFLGIIDAEFHNCLGNFAINESDMSKKI
TSHCVLCLVWPRQLDDLSQVMQHNPRIEQALIELRINFANSVCQTHHGRRMIGQARFKGM
VVGLGSWIGVEFLIILGVEISDNPLPDRIFNFENHLRHVVTNFLDINW
>orf03591
(SEQ ID NO: 1713)
LIDLRGIVINFSASFHVDNLTCGKGLNVMRLGIPELPINLATIILEGKG
>orf03604
(SEQ ID NO: 1714)
MDALVLQKNQETIQQIAVKIRFLDGHDYYSLIDIDNRRTNQTVFPFVNFEDIAF
>orf03605
(SEQ ID NO: 1715)
MAFFTEIPTRACLINLAITLHIVETCQGFNDLSLHLRVLAL
>orf03609
(SEQ ID NO: 1716)
MLLPLPFNTSKIKQIAMHSDLNQKEMIGHIFHDEDIF
>orf03614
(SEQ ID NO: 1717)
MKQTVKKLALVASIAATLGGGVSVASAAVQYPEGGVWTYGSGNGGAYSNYYHPSKYHSST
VVSRKTGSSDKGYAGAGGTSRAWIRTSWGEKVAFYYNV
>orf03643
(SEQ ID NO: 1718)
LVEQLTFNQWVTGSSPVRVIYAGLAELADAPDLGSGA
>orf03675
(SEQ ID NO: 1719)
MKELLNKAFFNKNKASLSKEVLLELQGKRLPVNLFLSKSLFQASL
>orf03690
(SEQ ID NO: 1720)
MMTKIKLTIDIIMPCRHITNIWIYKEEGRVNLFFYSQIFFDAIDERIIHNFNSKYHLSFF
SPVTGFSQIFDKTLACLG
>orf03695
(SEQ ID NO: 1721)
LHTSFRSSVGHSHTWHQDIVRPILFSRFNDSIVILWQNCPTFN
>orf03713
(SEQ ID NO: 1722)
MLEQARLKVEQQAIKNIQFLEQDLPKNPLEKEFDCLAVSRVLHHMPDLDAALSLFHQHLK
EDGKLIIADFTRTEANHHGFDLAELENKLIEHGFSSVHSQILYSAEDLFQGNHSEFFLIV
AQKSLA
>orf03714
(SEQ ID NO: 1723)
MKHDFNHKAETFDSPKNIFLANLVCQAAEKQIDLLSDKEILDFGGGTGLLALPLTPSQAG
>orf03716
(SEQ ID NO: 1724)
VWKKKKVKAGVLLYAVTIAAIFSLLLQFYLNRQIAHYQDYALNKEKLVAFAMAKRTKDKA
EQESGEQVFNLGQVSYQNKKTSLVTTVRTSKSQYEFLFPSVKIKEEKRDKKEEVATDSSE
KAEKKNQKRSLKRKRIPSQFNYNALNPE
>orf03718
(SEQ ID NO: 1725)
MVDLQSFFTRKYLNLNSVDAYLILPRLQGHLSYPQDFFLLQDFCFLLPIFLNLSQKEGRN
AGKDS
>orf03733
(SEQ ID NO: 1726)
MRIRNSPFDHILQTIFEFEDRTCQVTCRFEACSSICNDNWEFSQHIISVFQSPSCHTVCD
KSDVFCSFLFDKNFASLWIYVVTITDQLCIGMWQLVHGSNHTQFTVSQPTHSIVGMHPNT
RSSIDCFFGFIKSRV
>orf03734
(SEQ ID NO: 1727)
MSKSNRHTFARNCTNKVFHPITFWCKGNFIKQAICRFLPRMKLLNTRVSHISWILCPLKS
FCEIWTFIINPTNLSTCCFFIMVSKIFSDCKQLLISGC
>orf03736
(SEQ ID NO: 1728)
MQCTFNVVVHHIYTCISMNMSIHKTWGNAITCIVNHLSPFRNLLYMFPKLAVHKFQVTTS
TNSVWVEKLIRFNIVRHNVNLLKRLILQFIMSITL
>orf03750
(SEQ ID NO: 1729)
MKKRMLLASTVALSFAPVLATQAEEVLWTARSVEQIQNDLTKTDNKTSYTVQYGDTLSTI
AEALGVDVTVLANLNKITNMDLIFPETVLTTTVNEAEEVTEVEIQTPQADSSEEVTTATA
DLTTNQVTVDDQTVQVADLSQPIAEVTKTVIASEEVAPSTGTSVPEEQTTETTRPVEEAT
PQETTPAEKQETQASPQAASAVEVTTTSSEAKEVASSNGATAAVSTYQPEETKIISTTYE
APAAPDYAGLAVAKSENAGLQPQTAAFKEEIANLFGITSFSGYRPGDSGDHGKGLAIDFM
VPERSELGDKIAEYAIQNMASRGISYIIWKQRFYAPFDSKYGPANTWNPMPDRGSVTENH
YDHVHVSMNG
>orf03763
(SEQ ID NO: 1730)
VLAEADALVDAEAEALVDAEADALVLAEAEALVDADSDALVDAEADALVDAEAEALVDAD
SDADVLADTEAEALVDAEADALVLVDADVLALVDADVLADVLALVDADVLAEAEALVLAE
AEALVDAEAEALVDADSDAEVLAEADALVLAEADALVDAEAEALVDAEAEALVDAXXHSF
IN
>orf03764
(SEQ ID NO: 1731)
VRRLQHRQVLQLQRQPVRRLQRQPVRQPQQAPVLRLQQVLAPQPQHQQVLRSQRQPVPLN
PHQPVHRLQQVLAPQLQHQRVLQLSMNQCVGIRINQCIGFSKY
>orf03766
(SEQ ID NO: 1732)
VRRNPHQPVHRLQQVLVHQLQHQRVLRLQQAPVRLNPHQRLPQPQQVPVRQLQQVLVHQL
PHQQVLQLQRQPAPQPQQVPVRQLQQAQAPLSQRQPVRQLQXXXFHSLIN
>orf03772
(SEQ ID NO: 1733)
VTDENTRKVRLLVAFFSIVIGYILSSFFISLYHLWQEALRGLL
>orf03774
(SEQ ID NO: 1734)
MNXXALVDAEAEADVDAEAEALVDADAEALVLAEADALVDADSDADVLAEAEALVDAEAD
ALIDADSEADVLAEAEALVDAEADALVDAEAEALVLADAEALVDAEADALVDAEADALVD
AEADALVDAEAEALVDAEADALVLAEAEALVDAEADALVDADSDAEVLVLAEAEALVDAE
ADALVDADSDAEILAEADALVDAEAEALVLADSDALVNAEADVLAEADALVDADSEALVL
AEADALVLAEAEALVDAEAEGTGMRKLIH
>orf03777
(SEQ ID NO: 1735)
VLALVDADVLADVLALVDADVLAEAEALVLAEAEALVDAEAEALVDADSDAEVLAEADAL
VLAEADALVDAEAEALVDAEAEALVDAEAEALVDADSDADVLAEADALVDAEADALVLAE
ADALVLAEADALVDADSEALVDAEAEALVDAEAEALVDAEAEALVDAEAEALVDAEAEAD
VDAEAEALVDADAEALVLAEADALVDADSNADVLAEAEALVDAEXXIPFIN
>orf03794
(SEQ ID NO: 1736)
MKIKEQTRKLAVGCLKQCFEVVDRTDEVSSKYCFEVADGS
>orf03804
(SEQ ID NO: 1737)
LLGSFFSWTTKELMGIIFFNNFPTVHKNNMIGYISSKTYLIKLIKNSI
>orf03818
(SEQ ID NO: 1738)
MEKILLHNLNQTEFFINKAIGWTLRDYSKTNPTWVTCFIEKNKERMAELSIKEASKYL
>orf03819
(SEQ ID NO: 1739)
MSLADLLEELEAAKDSKKARSMEAYMRHQFSFLGIAVPERNKLYKNIFQKRKKQRLSIGI
LQTLAGKRILENTNMWLLTI
>orf03829
(SEQ ID NO: 1740)
MTTGWFQVNGRWYYAYSSGALAVNTTVDGYSVNYNGEWAQ
>orf03851
(SEQ ID NO: 1741)
MAFTTEELLNLGLTEEQAKSVFALRGKELNEDKSALETIKQERDSLKSQLQKAEEQVEHL
KSLENISAEQKDAIDKLQAEYDKYKNEAAAELAQTKKVSAISLALKDTNAFNPDKLMKFI
DVDAIQIDDNGKPQIDEVINGIKESDPHLFQAEESKPSPNIFPLR
>orf03853
(SEQ ID NO: 1742)
MGSSGEMRTRPAEELGVDTFYYSMKAMARPACSPLQGQIVTKGTGREIDGITIYSLLDYG
YGTAAGCLGIHCGHYLTPFIVGVHELPNLPDYLKNLTPEQAEENARIEAGQRGLERLIKT
HKERLHYAHTLQDDKMIQAERLKVRGYQTKIRNLINQHDFLTRDYRREKLYIS

[0423] In some embodiments, preferred 23F antigens are selected from the polypeptides orf01158 (SEQ ID NO: 1297), orf01305 (SEQ ID NO: 1309), orf01307 (SEQ ID NO: 1311), orf01631 (SEQ ID NO: 1343), orf01804 (SEQ ID NO: 1362), orf01807 (SEQ ID NO: 1364), orf02164 (SEQ ID NO: 1434), orf02189 (SEQ ID NO: 1451), orf02194 (SEQ ID NO: 1455), orf02219 (SEQ ID NO: 1466), orf02221 (SEQ ID NO: 1467), orf02224 (SEQ ID NO: 1470), orf02228 (SEQ ID NO: 1474), orf02242 (SEQ ID NO: 1484), orf02244 (SEQ ID NO: 1485), orf02246 (SEQ ID NO: 1486), orf02247 (SEQ ID NO: 1487), orf02652 (SEQ ID NO: 1491), and immunogenic fragments thereof.

### Example 3

### Pilus Adhesion

[0424] The pilus 2 mediates adhesion to alveolar epithelial cells A459. Dual-label staining shows that a pilus 2-positive strain adheres to the surface of the A549 cells and that the pilus (visualized using labeled anti-01287 antibody) is contacting the cells.

[0425] Furthermore, isogenic knockout mutants of the pilus are significantly impaired in host cell interaction. FIG. 2 shows that a pilus-negative strain (D39) fails to bind to A549 cells, in contrast to a pilus-positive strain (PN110). Knockout of the pilus in PN110 removes binding.

[0426] Incubation of A459 cells grown on glass coverslips with 01287 purified protein shows low level binding by confocal microscopy inspection. This observation was confirmed by incubating the protein with cells in suspension and quantifying the level of adherence by FACS analysis (FIG. 4). Pneumococcal pilus 1 RrgA subunit was used as positive control comparison, and green fluorescent protein (GFP) as a negative control.

[0427] Purified pilus was imaged by confocal microscopy. It was shown to adhere to A459 cells grown on glass coverslips. Furthermore, purified pilus seems to increase adherence to the respiratory cells when added to strains expressing the pilus type 2. This effect is probably due to the interaction of the purified pilus with both bacteria and A549 cells. Purified pilus does not increase adherence of isogenic knockout mutants of the pilus 2 to the respiratory cells (FIG. 3).

### Example 4

### Other Sequences from INV104B

[0428] An exemplary nucleic acid sequence for LepA Peptidase (orf 01289) is hereby provided:

(SEQ ID NO: 1743)
ATGCTGCTTAAAAAGAAACATAAGAAACCAGTAACACAAGTCAATCGGG
ATAAGTCTCCGCCGAGTGTCTGGGGAGATATCCTTTACTTAGTCAGTAA
ACTTCTGATGGTTGGATTTGTACTAGCCATCCTTTACTTTTTCGTCTTT
GGATTATTAAGATACAATGACGATGGCATGAAGCCCGCCTTAAAAGATG
GCGACTTGGTCGTCTATTATAGGTTGGATAAACGCTATTCGATTGGTGA
TTTGCTAGTCTATAGTTATAAAGGTAAGGAAAGAGTGGCGCGTGTCATA
GCAACCGAAGGAAGTACAATCGATATAAACGAAAATGGTCTCATCATCA
ACGGTTCTCCTCAACAAGAGCAAGATATCTACAAAGAAACGCTGCTCTA
TAAGGAAGGGGCAACCTTCCCGATGAAAGTOCCAGCAGGACAACTTTTT
GTCCTCGGGGACAATCGAACAACGGCTGTAGACAGTCGTGCTTTTGGAA
CCATCCCTATACAGGATACTCAAGGCAAAGTTGTAACAGTCATTAGAAG
ACGAGGCTTT

[0429] An exemplary amino acid sequence for LepA Peptidase is hereby provided:

(SEQ ID NO: 673)
MLLKKKHKKPVTQVNRDKSPPSVWGDILYLVSKLLMVGFVLAILYFFVF
GLLRYNDDGMKPALKDGDLVVYYRLDKRYSIGDLLVYSYKGKERVARVI
ATEGSTIDINENGLIINGSPQQEQDIYKETLLYKEGATFPMKVPAGQLF
VLGDNRTTAVDSRAFGTIPIQDTQGKVVTVIRRRGF

[0430] An exemplary nucleic acid sequence for sort-1 (orf01285) is hereby provided:

(SEQ ID NO: 1744)
ATGATGAAAACCAAGCGTGAGAAACCAAAAAAGAGTCTGTCTAGGCGTC
TCGTTCTTGCTGTGGATGGGGTGATCAATCACTTGCTGCTCATTTTTGC
AGCTTTGATCTTTCTCTTTGGTTTCTACGCCCTTTGGGATTCCAACCAA
GTCTACTCCTTAGCTTCGTCAAGTGAGTACGAAGCTTATCGACCTGTCA
CGACGCAACAGGATGAGCTGGCCAGTTTTTCAGGCTTCAGCAAACTCCA
AGAACTCAATCCCGAAGTCCTCGGTTGGATCAATGTCTATGGCACCAAT
ATCGACTATCCCTTAGTCCAAGCCAAGGACAATGAAAAGTATCTCAACA
AGGACTCCAAAGGTGAGTTTGCAGCGACAGGCGCTATCTTTCTCGATGC
ACGAAATAATCCTAAGTTCGAAGACTTTAATACCATTATCTACGGGCAC
CACGTAGAAAATGGGGTCATGTTTGGTGATGTGGCTAAGTTTGCTGATC
AGGAATTTTTTGACCAGCATCGTTACGGTAGTATATACTACAATGGTGT
GGAAAAAGGGCTCGAGATCTTTGAGATGTTGGAGGTTGATGCCTATGAC
TTTAACATCTATGATCCAGGAATACAGGGTGAGGACCGCCAGCAGGCCT
ATCTAGACCACCTGCTCTCAGTCGCCATGCACAAGCGGGATATCTCACT
CTCACCGAGTGATCGTATCATCCTACTCAGTACCTGTTTTCTCGATGTG
ACCAATGGTCGTCATATCGTAGTCGCAAAGATTACAGACACCGTCCCTA
AAAATACTTTCCATACAAAAAAATCAAAACCATTTCCATACAGTGTCTT
TGATGACTCGTCTCTTGGACGTTTCCTCTCATCAATCCCACTATGGATT
TGGTACCTTATCTTGTTTGTATTGTTCTTGCTCTTGATTTTCTTACTCC
TTGTCCTCTACTTGATCCTACGTCGTAGAAGAGAGAGTAAAAAAAATGC
AAGAAGCAGACCCTTTTACTGACTAAGGGTGAATAGAAA

[0431] An exemplary amino acid sequence for sort-1 is hereby provided:

(SEQ ID NO: 676)
MMKTKREKPKKSLSRRLVLAVDGVINHLLLIFAALIFLFGFYALWDSNQ
VYSLASSSEYEAYRPVTTQQDELASFSGFSKLQELNPEVLGWINVYGTN
IDYPLVQAKDNEKYLNKDSKGEFAATGAIFLDARNNPKFEDFNTIIYGH
HVENGVMFGDVAKFADQEFFDQHRYGSIYYNGVEKGLEIFEMLEVDAYD
FNIYDPGIQGEDRQQAYLDHLLSVAMHKRDISLSPSDRIILLSTCFLDV
TNGRHIVVAKITDTVPKNTFHTKKSKPFPYSVFDDSSLGRFLSSIPLWI
WYLILFVLFLLLIFLLLVLYLILRRRRESKKNARSRPFY

[0432] An exemplary nucleic acid sequence for sort-2 (orf01282) is hereby provided:

(SEQ ID NO: 1745)
ATGACGGTTCAAAAAAGAGCGCGATTTAAAAACGTATTTCTGGTATTCT
TCTGTGTTTTTGTAGCTCTTTTTAGTTGGCAGAGAGTAGTAGAAGCAAG
TGACTATGATCACTATAATCCTATTGAAAAGGATGCTTCGAGCACAGGT
TTTGAAACCCTACAGCACTTGAACAAAGATGTTTGCGGTTGGATTAGCC
TTGATGGGACCAAGGTAGACTATCCGCTTCTACAAAGTCAGGATAATGT
CAAATACCTTGACCGCAATGCCTTTGGCGATTATACGATAATGGGATCA
ATTTTTCTCGACTATCGCTTTAATCCCAACTTTACTGATTTTAATACGA
TCATCTACGGACACTCTATGGCTTCAGGGGCTATGTTCGGTGAGATTAA
GAAATTTGCTGATAAGGAATTCTTCGACCAGCATCGCTACGGTTCTATC
TACTACAATGGTCGAGAACGTGGTCTTGAAATTTTTGGGATTTTAGAAG
TGGATGCCTATGACACGGAGATTTATCGAACCTTGAGTTCCAAGGATGA
GGAACACCAGGCTTACTATCAATATCTGCTAAGTAAAGCCAAGTACAAG
CGAGATGTTTCCTTAACA

[0433] An exemplary amino acid sequence for sort-2 is hereby provided:

(SEQ ID NO: 1123)
MTVQKRARFKNVFLVFFCVFVALFSWQRVVEASDYDHYNPIEKDASSTG
FETLQHLNKDVCGWISLDGTKVDYPLLQSQDNVKYLDRNAFGDYTIMGS
IFLDYRFNPNFTDFNTIIYGHSMASGAMFGEIKKFADKEFFDQHRYGSI
YYNGRERGLEIFGILEVDAYDTEIYRTLSSKDEEHQAYYQYLLSKAKYK
RDVSLT

[0434] A number of embodiments of the inventive methods and compositions have been described. Nevertheless, it will be understood that various modifications may be made without departing from the spirit and scope of the invention.

TABLE 1
Pilus and Pilus II Screening Results

| | | | | Patient Information | | | | | | |
|---|---|---|---|---|---|---|---|---|---|---|
| Strain Identity & Pilus Presence | | | | | Age | | | Strain Source Information | | |
| Strain | Serotype | Pilus | Pilus II | Year | (yrs) | Sex | Diagnosis | Source | Country | Reference |
| 19FIJ | 19F | No | No | | | | | Iceland | | Same ST of |
| | | | | | | | | | | NCTC11906 |
| England14-9 | 14 | No | No | | | | | PMEN | England | PN93/872/B (ATCC |
| | | | | | | | | | | 700676) |
| PN137 | 14 | No | No | 1999 | 51 | F | meningitis | ISS | Italy - Arezzo | Same ST of |
| | | | | | | | | | | England14-9/mefA |
| PN099 | 14 | No | No | 1998 | 9 | M | meningitis | ISS | Italy - Reggio | erm |
| | | | | | mos. | | | | Emilia | |
| Spain14-5 | 14 | No | No | 1990 | | | | PMEN | Spain | MS22 (ATCC 700902) |
| CSR14-10 | 14 | No | No | 1987 | | | | PMEN | Slovakia | 87-029055 (ATCC |
| | | | | | | | | | | 700677) |
| Tennessee23F-4 | 23F | No | No | 1991 | 1 | F | bacteraemia | PMEN | USA | CS111 (ATCC 51916) |
| South Africa19A- | 19A | No | No | | | | | PMEN | South Africa | 51702 (ATCC 700904) |
| 13 | | | | | | | | | | |
| 67A | 8 | No | No | | | | Meningitis | Brazil | Brazil | |
| G54 | 19F | No | No | | | | | Lab strains | Italy | Complete - Glaxo |
| | | | | | | | | | | Wellcome |
| South Africa19A-7 | 19A | No | No | 1989 | | | | PMEN | South Africa | 17619 (ATCC 700674) |
| Spain23F-1 | 23F | No | No | 1984 | 67 | | pneumonia | PMEN | Spain | SP264 (ATCC 700669) - |
| | | | | | | | | | | Finishing - Sanger |
| Spain6B-2 | 6B | Yes^{a} | No | 1988 | | | other | PMEN | Spain | GM17 (ATCC 700670) |
| 1889 | 18C | No | No | 1996 | | | sepsis | ISS | Italy - Bergamo | (ST100 generally |
| | | | | | | | | | | associated to |
| | | | | | | | | | | serotypes 33F) |
| AP141 | 14 | No | No | 2002 | 38 | | sepsis | ISS | Italy - Bergamo | |
| AP173 | 14 | No | No | 2003 | 3 | | sepsis | ISS | Italy - Novara | |
| 6BIJ | 6B | Yes^{a} | No | | | | | Iceland | | |
| PT051 | 14 | Yes^{b} | No | 2001 | 49 | | sepsis | ISS | Italy - Torino | Same ST of Spain 9V-3/ |
| | | | | | | | | | | erm |
| Spain9V-3 | 9V | Yes^{c} | No | 1993 | | | | PMEN | France | TL7/1993 (ATCC |
| | | | | | | | | | | 700671) |
| Poland23F-16 | 23F | Yes^{a} | No | 1999 | 13 | F | LRTI | PMEN | Poland | 178 (ATCC BAA-343) |
| PB011 | 6B | Yes^{d} | No | 2001 | 11 | | meningitis | ISS | Italy - Bari | |
| | | | | | mos. | | | | | |
| PB001 | 3 | No | No | 2001 | | | meningitis | ISS | Italy - Bari | erm |
| PT131 | 3 | No | No | 2002 | 34 | | pneumonia | ISS | Italy - Novara | |
| 70A | 3 | No | no | | | | Meningitis | Brazil | Brazil | |
| OXC141 | 3 | No (by | no | | | | | Sanger | | Finishing - Sanger |
| | | BLAST) | | | | | | | | |
| South Africa6B-8 | 6B | No | No | 1990 | | | | PMEN | South Africa | 50803 (ATCC 700675) |
| AP/PT108 | 7F | No | Yes | 2003 | 3 | | sepsis | ISS | Italy - Cuneo | erm |
| 32/14 | 7F | No | Yes | 1999 | <5 | | carriage | ISS | Italy - Roma | |
| PN195 | 7F | No | Yes | 2002 | 44 | | meningitis | ISS | Italy - Napoli | |
| 86A | 7F | No | Yes | | | | Meningitis | Brazil | Brazil | |
| 16117 | 18C | No | No | | 10 | | Carriage | Brazil | Brazil | |
| | | | | | mos. | | | | | |
| 6054 | 18C | No | No | | 6 | | Carriage | Brazil | Brazil | |
| 19135 | 18C | No | No | | 10 | | Carriage | Brazil | Brazil | |
| TIGR4 | 4 | Yes^{c} | No | | 30 | M | meningitis | Lab strains | Norway- | JNR.7/87 (ATCC BAA- |
| | | | | | | | | | Kongsvinger | 334) - Complete -TIGR |
| INV104B | 1 | No (by | Yes | | | | | Sanger | | Finishing - Sanger |
| | | BLAST) | | | | | | | | |
| PNS28 | 14 | No | No | 2001 | | | sepsis | ISS | Italy - Perugia | Same ST of Clone 32 |
| Taiwan19F-14 | 19F | Yes^{c} | Yes | 1997 | | | meningitis | PMEN | Taiwan | TW31 (ATCC 700905) |
| Taiwan23F-15 (**) | 23F | Yes^{e} | No | 1997 | | | bacteraemia | PMEN | Taiwan | TW17 (ATCC 700906) |
| Hungary19A-6 | 19A | Yes^{a} | No | 1989 | | | | PMEN | Hungary | HUN663 (ATCC |
| | | | | | | | | | | 700673) |
| Finland6B-12 | 6B | Yes^{a} | No | 1987 | | | | PMEN | Finland | 43362 Fi10 (ATCC |
| | | | | | | | | | | 700903) |
| SP307 | 5 | No | No | 2000 | 3 | | sepsis | ISS | Italy - Bergamo | |
| PT075 | 5 | No | No | 2001 | 61 | | sepsis | ISS | Italy - Torino | |
| 96A | 5 | No | no | | | | Meningitis | Brazil | Brazil | |
| PN57 | 1 | No | No | 1997 | | | meningitis | ISS | Italy - Roma | Same ST of INV1871 |
| P1031 | 1 | No | No | 2002 | 45 | F | Meningitis | Ghana | Ghana | |
| P1074 | 1 | No | No | 2003 | 70 | M | Meningitis | Ghana | Ghana | |
| PN110 | 1 | No | Yes | 1998 | 5 | | meningitis | ISS | Italy - Lecco | |
| PB013 | 1 | No | Yes | 2002 | | | sepsis | ISS | Italy - Bari | erm |
| SPPD | 1 | No | Yes | 2005 | | | bilateral | Padova | Italy-North | (isolated from from BE; |
| | | | | | | | pneumonia + | | | patient's sera available) |
| | | | | | | | sepsis | | | |
| D39 | 2 | No | No | 1916 | | | pneumonia | Lab strains | Caucasian | NCTC 7466 |
| R6 | cps- | No | No | 1930 | | | | Lab strains | USA | (ATCC BAA-255) - |
| | | | | | | | | | | Complete - Eli Lilly |
| P1054 | 1 | No | No | 2001 | 32 | F | Meningitis | Ghana | Ghana | |
| 1IJ | 1 | No | No | | | | | Iceland | | |
| 2010 | 34 | No | No | | 3 | | Carriage | Brazil | Brazil | |
| 30A | 3 | Yes?^{b} | no | | | | Meningitis | Brazil | Brazil | |
| 3IJ | 3 | No | No | | | | | Iceland | | |
| PN95 | 3 | No | No | 1998 | 65 | | meningitis | ISS | Italy - Milano | |
| PNS32 | 14 | No | No | 2001 | 32 | | sepsis | ISS | Italy - Napoli | Same ST of |
| | | | | | | | | | | Sweden 15A-25/erm |
| 27/13 | 14 | No | No | 1999 | <5 | | carriage | ISS | Italy - Roma | |
| 6AIJ | 6A | No | No | | | | | Iceland | | |
| 117 | 4 | Yes^{b} | no | | | | Meningitis | Brazil | Brazil | |
| JJA | 14 | No | no | | | | Meningitis | Brazil | Brazil | |
| 279A | 14 | No | no | | | | Meningitis | Brazil | Brazil | |
| P1040 | 14 | No | No | 2002 | 0 | M | meningitis | Ghana | Ghana | |
| P1059 | 6A | No | No | 2002 | 47 | F | meningitis | Ghana | Ghana | |
| P1075 | 14 | No | No | 2003 | 8 | M | meningitis | Ghana | Ghana | |
| P1076 | 14 | No | No | 2003 | 0 | F | meningitis | Ghana | Ghana | |
| P1077 | 14 | No | No | 2003 | 54 | M | meningitis | Ghana | Ghana | |
| P1083 | 38 | Yes^{f} | No | 2003 | 58 | M | meningitis | Ghana | Ghana | |
| P1086 | 4 | No | No | 2002 | | | meningitis | Ghana | Ghana | |
| P1095 | 4 | No | No | 2004 | | | | Ghana | Ghana | |
| P1101 | 38 | No | No | 2004 | | | | Ghana | Ghana | |
| P1104 | 4 | No | No | 2004 | | | | Ghana | Ghana | |
| PJ1466 | 7F | no | Yes | | | | | Sweden | Sweden | |
| PJ176 | 14 | no | No | | | | | Sweden | Sweden | |
| PJ1354 | 1 | no | Yes | | | | | Sweden | Sweden | |
| I101 | 3 | no | No | | | | | Sweden | Sweden | |
| P1022 | 3 | No | No | 2001 | 1 | M | meningitis | Ghana | Ghana | |
| P1068 | 10F | No | No | 2003 | 42 | M | meningitis | Ghana | Ghana | |
| RP1554 | 9V | yes^{c} | No | | 68 | | | Sweden | Sweden | |
| RP3718 | 9V | yes^{b} | No | | 4 | | | Sweden | Sweden | |
| AP207 | 9V | Yes | No | 2003 | 71 | | meningitis | ISS | Italy | |
| PT052 | 9V | Yes | No | 2001 | 74 | | meningitis | ISS | Italy | |
| PN131 | 24F | Yes | No | 1998 | 72 | M | meningitis | ISS | Italy | |
| AP062 | 9V | Yes | No | 2003 | 91 | | | ISS | Italy | |
| AP233 | 6B | Yes | No | 2003 | 82 | | | ISS | Italy | |
| PT134 | 6B | Yes | No | 2003 | 44 | | | ISS | Italy | |
| PN6 | 6B | Yes | No | 1996 | | | meningitis | ISS | Italy | |
| PN20 | 6B | Yes | No | 1997 | 1 | M | meningitis | ISS | Italy | |
| PN68 | 6B | Yes | No | 1997 | 65 | F | meningitis | ISS | Italy | |
| PN126 | 6B | Yes | No | 1998 | 3 | M | meningitis | ISS | Italy | |
| SP95 | 6B | Yes | No | 1999 | 4 | F | meningitis | ISS | Italy | |
| AP174 | 6B | Yes | No | 2003 | 18 | | | ISS | Italy | |
| PN217 | 6B | No | No | 2003 | | | meningitis | ISS | Italy | |
| 1404 | 6B | Yes | No | 1999 | | F | carriage | ISS | Italy | |
| Pn102 | 6B | Yes | No | 1998 | 2 | F | meningitis | ISS | Italy | |
| PB018 | 6B | Yes | No | 2001 | | | | ISS | Italy | |
| PN218 | 19F | No | No | 2003 | 58 | | meningitis | ISS | Italy | |
| AP235 | 23F | No | No | 2003 | 63 | | | ISS | Italy | |
| PGX1416 | 19F | Yes | Yes | | | | | ISS | | proviene dalla GSK |
| SME15 | 35B | Yes^{f} | No | | | | | Sweden | Sweden | |
| PJ1423 | 4 | Yes | No | | | | | Sweden | Sweden | |

Pilus Type: ^{a}6B/c;
^{b}T4;
^{c}T4/c;
^{d}6B;
^{e}23F/c;
^{f}23F

1. An isolated pilus encoded by the Streptococcus pneumoniae pilus II island (INV104B).

2. The pilus of claim 1, wherein the pilus comprises a sortase.

3. The pilus of claim 1, wherein the pilus comprises a LPXTG cell wall anchored protein.

4. The pilus of claim 1, wherein the pilus has been separated from cells by enzymatic digestion or mechanical shearing.

5. The pilus of claim 1, wherein the mechanical shearing comprises ultrasonication.

6. The pilus of claim 1, wherein the pilus is substantially free of bacterial cells.

7. An immunogenic composition comprising one or more pili of claim 1.

8. A method of producing the pilus of claim 1, the method comprising subjecting a bacterial cell that produces the pilus to enzymatic digestion or mechanical shearing and isolating the pilus from the cell.

9. An isolated Streptococcus pneumoniae sortase, wherein the sortase is selected from the group consisting of SEQ ID NO:282, SEQ ID NO:1386, SEQ ID NO:676, or SEQ ID NO:1123.

10. An isolated Streptococcus pneumoniae LPXTG cell wall anchored protein, wherein the LPXTG cell wall anchored protein is selected from the group consisting of SEQ ID NO:2, SEQ ID NO:4, SEQ ID NO:6, SEQ ID NO:7, SEQ ID NO:8, or SEQ ID NO:9.

11. A method of isolating pili encoded by the Streptococcus pneumoniae pilus II island (INV104B) comprising:
subjecting bacterial cells that produce pili encoded by the Streptococcus pneumoniae pilus II island (INV104B) to enzymatic digestion or mechanical shearing; and
isolating the pili from the cells.

12. The method of claim 11, wherein the mechanical shearing involves ultrasonication.

13. The method of claim 11, wherein the enzymatic digestion is performed using mutanolysin.

14. The method of claim 11, wherein the isolating comprises one or more density gradient centrifugations.

15. The method of claim 11, wherein the isolating comprises reducing polydispersity.

16. The method of claim 15, wherein polydispersity is reduced by separating components by size.

17. (canceled)

18. (canceled)

19. (canceled)

20. (canceled)

21. (canceled)

22. (canceled)

23. (canceled)

24. An immunogenic composition comprising a purified Streptococcus pneumoniae pilus II island (INV104B) polypeptide in oligomeric form.

25. The immunogenic composition of claim 24, wherein the oligomeric form is a hyperoligomer.

26. The immunogenic composition of claim 24, wherein the polypeptide is a fragment of a LPXTG cell wall anchored protein encoded by the Streptococcus pneumoniae pilus II island (INV104B).

27. The immunogenic composition of claim 26, wherein the fragment is at least 100 contiguous amino acid residues in length.

28. The immunogenic composition of claim 26, wherein the fragment is at least 50 contiguous amino acid residues in length.

29. The immunogenic composition of claim 26, wherein the fragment is at least 20 contiguous amino acid residues in length.

30. The immunogenic composition of claim 26, wherein the fragment retains the ability to covalently attach to a peptidoglycan cell wall.

31. The immunogenic composition of claim 26, wherein the fragment retains the ability to cross-link to another fragment or protein through an LPXTG motif.

32. The immunogenic composition of claim 24, wherein the polypeptide comprises two or more fragments of LPXTG cell wall anchored proteins encoded by the Streptococcus pneumoniae pilus II island (INV104B).

33. A method of inducing an immune response against Streptococcus pneumoniae, the method comprising administering an effective amount of pili encoded by the Streptococcus pneumoniae pilus II island (INV104B) to a subject.

34. The method of claim 33, wherein the pili are isolated.

35. The method of claim 33, wherein the subject is human.

36. (canceled)

37. (canceled)

38. (canceled)

39. (canceled)

40. (canceled)

41. (canceled)

42. (canceled)

43. (canceled)

44. (canceled)

45. (canceled)

46. (canceled)

47. (canceled)

48. (canceled)

49. (canceled)

50. (canceled)

51. (canceled)

52. (canceled)

53. (canceled)

54. (canceled)

55. (canceled)

56. (canceled)

57. An isolated pilus or pilus-like multimer comprising a polypeptide comprising the amino acid sequence of a pilus protein encoded by the Streptococcus pneumoniae pilus II island (INV104B) with up to 30 amino acid substitutions, insertions, or deletions.

58. The pilus or pilus-like multimer of claim 57 with up to 20 amino acid substitutions, insertions, or deletions.

59. The pilus or pilus-like multimer of claim 57 with up to 10 amino acid substitutions, insertions, or deletions.

60. The pilus or pilus-like multimer of claim 57 with up to 5 amino acid substitutions, insertions, or deletions.

61. (canceled)

62. (canceled)

63. The polypeptide of claim 57, wherein the protein is a LPXTG cell wall anchored protein.

64. A polypeptide comprising the amino acid sequence of one or more LPXTG cell wall anchored proteins encoded by the Streptococcus pneumoniae pilus II island (INV104B), or immunogenic fragments thereof.

65. The polypeptide of claim 64, wherein the polypeptide comprises the amino acid sequences of two or more LPXTG cell wall anchored proteins, or immunogenic fragments thereof.

66. A purified polypeptide consisting of an amino acid sequence selected from the group consisting of SEQ ID NO:2, SEQ ID NO:4, SEQ ID NO:6, SEQ ID NO:7, SEQ ID NO:8 and SEQ ID NO:9.

67. A purified polypeptide comprising at least ten consecutive residues of an amino acid sequence selected from the group consisting of: SEQ ID NO:2, SEQ ID NO:4, SEQ ID NO:6, SEQ ID NO:7, SEQ ID NO:8 and SEQ ID NO:9.

68. A purified polypeptide consisting of an amino acid sequence which comprises a sequence at least 85% identity to an amino acid sequence selected from the group consisting of: SEQ ID NO:2, SEQ ID NO:4, SEQ ID NO:6, SEQ ID NO:7, SEQ ID NO:8 and SEQ ID NO:9.

69. (canceled)

70. (canceled)

71. (canceled)

72. (canceled)

73. (canceled)

74. (canceled)

75. (canceled)

76. (canceled)

77. (canceled)

78. (canceled)

79. (canceled)

80. (canceled)

81. (canceled)

82. (canceled)

83. (canceled)

84. (canceled)

85. (canceled)

86. (canceled)

87. (canceled)

88. (canceled)

89. (canceled)

90. (canceled)

91. (canceled)

92. (canceled)

93. (canceled)

94. (canceled)

95. (canceled)

96. A purified polypeptide, the amino acid sequence of which is at least 85% identical to a sequence selected from the group consisting of SEQ ID NO: 29 through SEQ ID NO:1742, or an immunogenic fragment thereof.

97. (canceled)

98. (canceled)

99. The purified polypeptide of claim 96, wherein the sequence is selected from the group consisting of SEQ ID NO: 29 through SEQ ID NO:1742.

100. A purified polypeptide, the amino acid sequence of which is at least 85% identical to a sequence selected from the group consisting of SEQ ID NO: 53, SEQ ID NO: 65, SEQ ID NO: 70, SEQ ID NO: 99, SEQ ID NO: 104, SEQ ID NO: 117, SEQ ID NO: 135, SEQ ID NO: 177, SEQ ID NO: 178, SEQ ID NO: 198, SEQ ID NO: 235, SEQ ID NO: 236, SEQ ID NO: 237, SEQ ID NO: 242, SEQ ID NO: 247, SEQ ID NO: 248, SEQ ID NO: 250, SEQ ID NO: 251, SEQ ID NO: 252, SEQ ID NO: 253, SEQ ID NO: 433, SEQ ID NO: 439, SEQ ID NO: 444, SEQ ID NO: 538, SEQ ID NO: 539, SEQ ID NO: 540, SEQ ID NO: 541, SEQ ID NO: 542, SEQ ID NO: 543, SEQ ID NO: 544, SEQ ID NO: 545, SEQ ID NO: 581, and SEQ ID NO: 593, or an immunogenic fragment thereof.

101. (canceled)

102. (canceled)

103. A purified polypeptide, the amino acid sequence of which is at least 85% identical to a sequence selected from the group consisting of SEQ ID NO: 626, SEQ ID NO: 628, SEQ ID NO: 629, SEQ ID NO: 630, SEQ ID NO: 631, SEQ ID NO: 632, SEQ ID NO: 639, SEQ ID NO: 645, SEQ ID NO: 747, SEQ ID NO: 751, SEQ ID NO: 752, SEQ ID NO: 783, SEQ ID NO: 786, SEQ ID NO: 787, SEQ ID NO: 810, SEQ ID NO: 812, SEQ ID NO: 813, SEQ ID NO: 824, SEQ ID NO: 831, SEQ ID NO: 842, SEQ ID NO: 847, SEQ ID NO: 875, SEQ ID NO: 876, SEQ ID NO: 879, SEQ ID NO: 880, SEQ ID NO: 882, SEQ ID NO: 913, SEQ ID NO: 914, SEQ ID NO: 925, SEQ ID NO: 926, SEQ ID NO: 947, SEQ ID NO: 948, SEQ ID NO: 968, SEQ ID NO: 987, SEQ ID NO: 988, SEQ ID NO: 990, SEQ ID NO: 992, SEQ ID NO: 1003, SEQ ID NO: 1007, SEQ ID NO: 1008, SEQ ID NO: 1036, SEQ ID NO: 1082, SEQ ID NO: 1120, and SEQ ID NO: 1123, or an immunogenic fragment thereof.

104. (canceled)

105. (canceled)

106. A purified polypeptide, the amino acid sequence of which is at least 85% identical to a sequence selected from the group consisting of SEQ ID NO: 1297, SEQ ID NO: 1309, SEQ ID NO: 1311, SEQ ID NO: 1343, SEQ ID NO: 1362, SEQ ID NO: 1364, SEQ ID NO: 1434, SEQ ID NO: 1451, SEQ ID NO: 1455, SEQ ID NO: 1466, SEQ ID NO: 14678, SEQ ID NO: 1470, SEQ ID NO: 1474, SEQ ID NO: 1484, SEQ ID NO: 1485, SEQ ID NO: 1486, SEQ ID NO: 1487, and SEQ ID NO: 1491, or an immunogenic fragment thereof.

107. (canceled)

108. (canceled)

109. A polynucleotide that encodes a polypeptide of claim 64, or immunogenic fragment thereof.

110. (canceled)

111. A method of inducing an immune response against Streptococcus pneumoniae, the method comprising administering an effective amount of a polypeptide of claim 64 to a subject.

112. An immunogenic fragment of a LPXTG cell wall anchored protein encoded by the Streptococcus pneumoniae pilus II island (INV104B).

113. An isolated polynucleotide encoding a polypeptide comprising an amino acid sequence selected from the group consisting of SEQ ID NO:2, SEQ ID NO:4, SEQ ID NO:6, SEQ ID NO:7, SEQ ID NO:8 and SEQ ID NO:9.

114. An isolated nucleic acid consisting of a polynucleotide sequence selected from the group consisting of SEQ ID NO:1, SEQ ID NO:3, SEQ ID NO:5, a degenerate variation of SEQ ID NO:1, a degenerate variation of SEQ ID NO:3 and a degenerate variation of SEQ ID NO:5.

115. An isolated nucleic acid comprising a sequence that hybridizes under stringent conditions to a hybridization probe, wherein the nucleotide sequence of the probe is selected from the group consisting of SEQ ID NO:1, SEQ ID NO:3, SEQ ID NO:5, the complement of SEQ ID NO:1, the complement of SEQ ID NO:3 and the complement of SEQ ID NO:5.

116. An isolated nucleic acid comprising a sequence that encodes a polypeptide comprising an amino acid sequence which is at least 85% identical to an amino acid sequence selected from the group consisting of: SEQ ID NO:2, SEQ ID NO:4, SEQ ID NO:6, SEQ ID NO:7, SEQ ID NO:8 and SEQ ID NO:9.

117. (canceled)

118. (canceled)

119. (canceled)

120. (canceled)

121. (canceled)

122. (canceled)

123. (canceled)

124. (canceled)

125. (canceled)

126. (canceled)

127. (canceled)

128. (canceled)

129. (canceled)

130. (canceled)

131. (canceled)

132. (canceled)

133. (canceled)

134. (canceled)

135. (canceled)

136. (canceled)

137. (canceled)

138. An isolated nucleic acid comprising a sequence that encodes a polypeptide the amino acid sequence of which is at least 85% identical to a sequence selected from the group consisting of SEQ ID NO: 29 through SEQ ID NO:1742.

139. (canceled)

140. (canceled)

141. The isolated nucleic acid of claim 138, wherein the sequence is selected from the group consisting of SEQ ID NO: 29 through SEQ ID NO:1742.

142. A method of inducing an immune response against Streptococcus pneumoniae, the method comprising administering an affective amount of an immunogenic fragment of a LPXTG cell wall anchored protein encoded by the Streptococcus pneumoniae pilus II island (INV104B) to a subject.

143. The method of claim 142, wherein the subject is human.

144. (canceled)

145. (canceled)

146. (canceled)

147. (canceled)

148. (canceled)

149. (canceled)

150. (canceled)

151. (canceled)

152. A method of isolating pili encoded by the Streptococcus pneumoniae pilus II island (INV104B), the method comprising:
subjecting Streptococcus pneumoniae cells that produce pili encoded by the Streptococcus pneumoniae pilus II island (INV104B) to ultrasonication or digestion with a lytic enzyme;
separating non-cellular components by density gradient centrifugation; and
isolating pili encoded by the Streptococcus pneumoniae pilus II island (INV104B).

153. The method of claim 152, wherein the lytic enzyme is mutanolysin.

154. The method of claim 152, wherein the non-cellular components are separated using density gradient centrifugation.

155. The method of claim 152, wherein the Streptococcus pneumoniae cells that produce pili encoded by the Streptococcus pneumoniae pilus II island (INV104B) are Streptococcus pneumoniae TIGR4 cells.

156. The method of claim 152, wherein the method further comprises degrading nucleic acids with a nuclease.

157. The method of claim 152, wherein the method further comprises reducing polydispersity by separating the pili encoded by the Streptococcus pneumoniae pilus II island (INV104B) by size using gel filtration chromatography.

The application's sequence listing, which the Patent Office published only in electronic form, follows.

SEQUENCE LISTING (1745 sequences)

SEQ ID NO: 1 - DNA, 2582 bp, Streptococcus pneumoniae
atgaacgttcaatatgattttaagaagattcaatattttaccagtagtttagttatctttctcgctattctttttttgtgtgcaccaattaattctttacgtgcagattcaataactgaacctcagacaactctgcacaaaacgattactccgatatcagggcaaaaagaccagtatgagttgtcactggatatcacatctaaactgggaacggagacccagtcagaacccttggatgtagtcttggttgccgatctttcagggagtatggaagagcgagatgtgtggtcttactctagtagacgatacattagtaggattgaagcactaaaacatacactgaaaggtgtgaatggtcgtcaggggctcattgatacaattctttctaattcccaaaaccgtctgtctatagttggttttgccggaaagattgataatcagtataatgaccgttattataatgaatattatctgagttatcaatatggaacttggccaaattgagctggttggtattcaaatatctcttcatatgatgatgctaaaactttagtatcttggagcacggattctaatagctcaaaaaatattgttagttcgttaacaattgctgactctagtcgttcttatggtatggacgcgggcattggcactgggacaaatataaatgctgggttaactgaagctcaaagattgttgcaaagtgcaagggctggggcaaaaaaagtagttattctgctgtcagatggcgaagctaatatgtattacgagtctaatagtgggagaacaatatataactattattctaatccaaatgtgggacgtatgattgatactccatattggtttacctctggtttagagagaggaatgctgaatatatctagtttaatagctccaaaaatagatggcttttattcaatcaaattcagatatataggttcaaacgatagtatcacatctcttaaaggatatatcagtggttataattctggaatccccaacgaaatattttctgccaataatgaaaatgacttgcaacaaaaattcaaagaaatcacagataaaattctacctctaggcgtacaccatgtaactatatcagatgtcttgtccaagtacgtgcagctgttacctggtgatgcttcacaccttcgtgtcgtcaaaatcaaggatggtaacgagcaagaactgaatgacaatcaagttacgattgaaactaagaagaacgaacagggattagtggaagtaacagccaagtttaatccgagttacactttggaggatgacgccaagtacgttctcaagtttactgtcacctctagccaagaggcatttgatgcgattgcgggtgataagacacttactagtgatgatgccgaagaagccgatgctactaaactctactccaacaagggggcaaaagttgcctattcctatggtattgggacctcacgtaccaaaataaaagactattctgagaagcccactttcaagccgtcagatccattgacggttcctgtagagattgagtggaaaggtgtggatggaaaatcaaatccatcagcaaatcgtccacctagtgtcgaattaaacttaaaccaaaagaaagatggaagtataaaggattcctatcgaaaggtcactagtccagttcaaacgaatagttttactgaaaatactagttttgcaaaggtagctaagggatatgactacgaactgaaagcaccagacgctccgggatacacagtcgaagttcaaaagacaggtacgaaagagaaaccatccttcaaagttatttaccgacagcttccaagtctcaccgtaaagaaaatcctagaaggtgaacaatcacctaataaatctttcacaattaatgttaccttttcagataaggatggcaagccgattaacggcaagtttgggaatacaacagtgactaacgggaaagcacagatttctctcaaaaatagtcaggaaactgccctcagttatctgcctcgtgatacccactataaggtggaagaagtagagaactctagaacgggatatcatgtcacctatgaaaaacaagaggggactttgtcagaggatgttcaaacaatcgtcaccaaccacagacttccgacactttcagtcacaaaaaaagttacaggtgcttttgctaatcttctgcaatcctttaagattaccattaacgtaaaggatgcgcaaaataaaccattgaatggatcgtatagtgcaatagtaaataatcaaaaaacaacgctacaattcaccaatggtaaggcgacagttgatctaaagaaagataaaaccatcaagattctcgaccttcctctaaatgctcgttatagtatcgaagaagaagcaagttcgtctcgtgggtatcaggtgtcctatgataaaaaagaaggaactcttgatgcaaataagtctgcgacagtcacgaataataaaaacagcgtacctgaaacgggaattgacttcttgagtagcactctcgtgcttggagtcgttcttcctctaggagggatcttctttatcatcttacttggtcaccttgtggtgaataggaggaa

SEQ ID NO: 2 - protein, 693 aa, Streptococcus pneumoniae
AGWYSNISSYDDAKTLVSWSTDSNSSKNIVSSLTIADSSRSYGMDAGIGTGTNINAGLTEAQRLLQSARAGAKKVVILLSDGEANMYYESNSGRTIYNYYSNPNVGRMIDTPYWFTSGLERGMLNISSLIAPKIDGFYSIKFRYIGSNDSITSLKGYISGYNSGIPNEIFSANNENDLQQKFKEITDKILPLGVHHVTISDVLSKYVQLLPGDASHLRVVKIKDGNEQELNDNQVTIETKKNEQGLVEVTAKFNPSYTLEDDAKYVLKFTVTSSQEAFDAIAGDKTLTSDDAEEADATKLYSNKGAKVAYSYGIGTSRTKIKDYSEKPTFKPSDPLTVPVEIEWKGVDGKSNPSANRPPSVELNLNQKKDGSIKDSYRKVTSPVQTNSFTENTSFAKVAKGYDYELKAPDAPGYTVEVQKTGTKEKPSFKVIYRQLPSLTVKKILEGEQSPNKSFTINVTFSDKDGKPINGKFGNTTVTNGKAQISLKNSQETALSYLPRDTHYKVEEVENSRTGYHVTYEKQEGTLSEDVQTIVTNHRLPTLSVTKKVTGAFANLLQSFKITINVKDAQNKPLNGSYSAIVNNQKTTLQFTNGKATVDLKKDKTIKILDLPLNARYSIEEEASSSRGYQVSYDKKEGTLDANKSATVTNNKNSVPETGIDFLSSTLVLGVVLPLGGIFFIILLGHLVVNRRK

SEQ ID NO: 3 - protein, 1949 aa, Streptococcus pneumoniae
ATGGACGCGGGCATTGGCACTGGGACAAATATAAATGCTGGGTTAACTGAAGCTCAAAGATTGTTGCAAAGTGCAAGGGCTGGGGCAAAAAAAGTAGTTATTCTGCTGTCAGATGGCGAAGCTAATATGTATTACGAGTCTAATAGTGGGAGAACAATATATAACTATTATTCTAATCCAAATGTGGGACGTATGATTGATACTCCATATTGGTTTACCTCTGGTTTAGAGAGAGGAATGCTGAATATATCTAGTTTAATAGCTCCAAAAATAGATGGCTTTTATTCAATCAAATTCAGATATATAGGTTCAAACGATAGTATCACATCTCTTAAAGGATATATCAGTGGTTATAATTCTGGAATCCCCAACGAAATATTTTCTGCCAATAATGAAAATGACTTGCAACAAAAATTCAAAGAAATCACAGATAAAATTCTACCTCTAGGCGTACACCATGTAACTATATCAGATGTCTTGTCCAAGTACGTGCAGCTGTTACCTGGTGATGCTTCACACCTTCGTGTCGTCAAAATCAAGGATGGTAACGAGCAAGAACTGAATGACAATCAAGTTACGATTGAAACTAAGAAGAACGAACAGGGATTAGTGGAAGTAACAGCCAAGTTTAATCCGAGTTACACTTTGGAGGATGACGCCAAGTACGTTCTCAAGTTTACTGTCACCTCTAGCCAAGAGGCATTTGATGCGATTGCGGGTGATAAGACACTTACTAGTGATGATGCCGAAGAAGCCGATGCTACTAAACTCTACTCCAACAAGGGGGCAAAAGTTGCCTATTCCTATGGTATTGGGACCTCACGTACCAAAATAAAAGACTATTCTGAGAAGCCCACTTTCAAGCCGTCAGATCCATTGACGGTTCCTGTAGAGATTGAGTGGAAAGGTGTGGATGGAAAATCAAATCCATCAGCAAATCGTCCACCTAGTGTCGAATTAAACTTAAACCAAAAGAAAGATGGAAGTATAAAGGATTCCTATCGAAAGGTCACTAGTCCAGTTCAAACGAATAGTTTTACTGAAAATACTAGTTTTGCAAAGGTAGCTAAGGGATATGACTACGAACTGAAAGCACCAGACGCTCCGGGATACACAGTCGAAGTTCAAAAGACAGGTACGAAAGAGAAACCATCCTTCAAAGTTATTTACCGACAGCTTCCAAGTCTCACCGTAAAGAAAATCCTAGAAGGTGAACAATCACCTAATAAATCTTTCACAATTAATGTTACCTTTTCAGATAAGGATGGCAAGCCGATTAACGGCAAGTTTGGGAATACAACAGTGACTAACGGGAAAGCACAGATTTCTCTCAAAAATAGTCAGGAAACTGCCCTCAGTTATCTGCCTCGTGATACCCACTATAAGGTGGAAGAAGTAGAGAACTCTAGAACGGGATATCATGTCACCTATGAAAAACAAGAGGGGACTTTGTCAGAGGATGTTCAAACAATCGTCACCAACCACAGACTTCCGACACTTTCAGTCACAAAAAAAGTTACAGGTGCTTTTGCTAATCTTCTGCAATCCTTTAAGATTACCATTAACGTAAAGGATGCGCAAAATAAACCATTGAATGGATCGTATAGTGCAATAGTAAATAATCAAAAAACAACGCTACAATTCACCAATGGTAAGGCGACAGTTGATCTAAAGAAAGATAAAACCATCAAGATTCTCGACCTTCCTCTAAATGCTCGTTATAGTATCGAAGAAGAAGCAAGTTCGTCTCGTGGGTATCAGGTGTCCTATGATAAAAAAGAAGGAACTCTTGATGCAAATAAGTCTGCGACAGTCACGAATAATAAAAACAGCGTACCTGAAACGGGAATTGACTTCTTGAGTAGCACTCTCGTGCTTGGAGTCGTTCTTCCTCTAGGAGGGATCTTCTTTATCATCTTACTTGGTCACCTTGTGGTGAATAGGAGGAA

SEQ ID NO: 4 - protein, 650 aa, Streptococcus pneumoniae
MDAGIGTGTNINAGLTEAQRLLQSARAGAKKVVILLSDGEANMYYESNSGRTIYNYYSNPNVGRMIDTPYWFTSGLERGMLNISSLIAPKIDGFYSIKFRYIGSNDSITSLKGYISGYNSGIPNEIFSANNENDLQQKFKEITDKILPLGVHHVTISDVLSKYVQLLPGDASHLRVVKIKDGNEQELNDNQVTIETKKNEQGLVEVTAKFNPSYTLEDDAKYVLKFTVTSSQEAFDAIAGDKTLTSDDAEEADATKLYSNKGAKVAYSYGIGTSRTKIKDYSEKPTFKPSDPLTVPVEIEWKGVDGKSNPSANRPPSVELNLNQKKDGSIKDSYRKVTSPVQTNSFTENTSFAKVAKGYDYELKAPDAPGYTVEVQKTGTKEKPSFKVIYRQLPSLTVKKILEGEQSPNKSFTINVTFSDKDGKPINGKFGNTTVTNGKAQISLKNSQETALSYLPRDTHYKVEEVENSRTGYHVTYEKQEGTLSEDVQTIVTNHRLPTLSVTKKVTGAFANLLQSFKITINVKDAQNKPLNGSYSAIVNNQKTTLQFTNGKATVDLKKDKTIKILDLPLNARYSIEEEASSSRGYQVSYDKKEGTLDANKSATVTNNKNSVPETGIDFLSSTLVLGVVLPLGGIFFIILLGHLVVNRRK

SEQ ID NO: 5 - DNA, 1244 bp, Streptococcus pneumoniae
ttgatgatcataatgaaaaaagaaaataaaaaaacaaaagaaataatcatgaaaaaaacattctttaaaaagctattcactgcaagcattgcagctataaccgctttgtccgtattcagaggtgtcccgacttttgcggatgataattcagcaataaccaaagcaaatggtgaaaataatgctgttgtgaagattaataaaacgttgaatattgcagagggaataacaacaccaacagcgacatttacatttaagtttacagaaaaaacaggacaatcttctaacggtgcgccatatcaaaccggagttgcaattccagatagaaatgtagaatacaataaaaatgatcacccaactgctgataagattcaaaaagcaacagaagacattttttcgggagttgcttatggccatgctggtgaatacgtttatgatgtagcggaagcaaaaactggatggcaggcgattaccaaaaatggtaaaacaattgatgccatgagatacgacaaacgtacatatgaaatgcacgttattgttaagaataaagtaaatggtggtgtctatatttcatcagtatactttaaggaaaataataaatctaacgcccctaaagtagaaccaagtgaacaaggcgtttataatttatttgataacacatataccaaagacgcaagtaaggagcctaatcctgatgatccgagtcaagtagaccccaatgcgaaagcattaacaattactaaaaaagttgatggagcttcaggggataaaacaagagatttccaattccatatcaagattcaacttccaagtacaaataaaacagcagaaacccctgttacgaatattatagtaaaacatggatctaagtcagaggtgttggcagtagtgaccccagcagatacagttgagtacaattttactcttaaagatggtgaaacatttacagttgaacaactaccagcaggttctaaatatacagtaactgaaactggagtagcaggttatacagattcatcaatttatactacaaatggtgcagaacaaacatctcaaggacaaaaaaatgtagattttacattaacagatatcctcataggtgaaaagaaaaacgacaacaaagttactaacaaaatcgacgacgttactcctactggtctcttgattgataaccttccattcattttgatgattggtcttggtttggctggatttgttgtcttgtctaaaaaacgtagagaagccta

SEQ ID NO: 6 - protein, 413 aa, Streptococcus pneumoniae
MIIMKKENKKTKEIIMKKTFFKKLFTASIAAITALSVFRGVPTFADDNSAITKANGENNAVVKINKTLNIAEGITTPTATFTFKFTEKTGQSSNGAPYQTGVAIPDRNVEYNKNDHPTADKIQKATEDIFSGVAYGHAGEYVYDVAEAKTGWQAITKNGKTIDAMRYDKRTYEMHVIVKNKVNGGVYISSVYFKENNKSNAPKVEPSEQGVYNLFDNTYTKDASKEPNPDDPSQVDPNAKALTITKKVDGASGDKTRDFQFHIKIQLPSTNKTAETPVTNIIVKHGSKSEVLAVVTPADTVEYNFTLKDGETFTVEQLPAGSKYTVTETGVAGYTDSSIYTTNGAEQTSQGQKNVDFTLTDILIGEKKNDNKVTNKIDDVTPTGLLIDNLPFILMIGLGLAGFVVLSKKRREA

SEQ ID NO: 7 - protein, 927 aa, Streptococcus pneumoniae
MRVSSDTNIYEYRALSPQQKAALEMIRADLYKFTVPYENLEYRFYKPDWVFGLGYQALATVRWKIEPATITVTKKWENVKEGAKKPDVWIQLLKDGKPEGERKRIESDKGQTTFEIPNKDEINKYSVKEVDKEGRDWKHKDFTAGQPVNKGNGHFEITNTKKEKPKIKVTFKKIAGDTNKDLAGAHLVLKKIFDDGNGLLIKQWDTIGQPVDIDLDAGSYTLTEEKAPDGYMLAAPVSFYVEEDGQIILPKGEDLEAQNDKTITMVDEKIKEKPTKPSGKLATTVEVDGTKADAQKELELSVATDKVTKTVKDTVVYENLLAGETYKLTGQLMKITADKEEEVATKETTFVADASGNGTTSLEFEDVSLEAGVKYVVYETAESEKEIDFKEGKEKHKVEHKDKDDKAQTVVVTKEKPTKPSGKLATTVEVDGTKADAQKELELSVATDKVTKTVKDTVVYENLLAGETYKLTGQLMKITADKEEEVATKETTFVADASGNGTTSLEFEDVSLEAGVKYVVYETAESEKEIDFKEGKEKHKVEHKDKDDKAQTVVVSKIKPEPGAQEVHFSKVNVGGEEIAGAEIHIKQGDTVVASWVSEAGKTHTLKLKPGHYIFHEAVAPGGYLAVTDIHFSVDETGQVTVTDVNGNTAVAEGNKLTVTDQTKPVTPPSPEEPGAQEVHFSKVNVGGEEIAGAEIHIKQGDTVVASWVSEAGKTHTLKLKPGHYIFHEAVAPGGYLAVTDIHFSVDETGQVTVTDVNGNTAVAEGNKLTVTDQTKPVTPPSPEEPGAQEVHFSKVNVGGEEIAGAEIHIKQGDTVVASWVSEAGKTHTLKLKPGHYIFHEAVAPGGYLAVTDIHFSVDETGQVTVTDVNGNTAVAEGNKLTVTDQSADKDKQDKLPNTGETTGTYLSILGMITAVFASLLYRSKKK

SEQ ID NO: 8 - protein, 1767 aa, Streptococcus pneumoniae
MNKGLFEKRCKYSIRKFSLGVASVMIGAAFFGTSPVLADSVQSGSTANLPADLATALATAKENDGRDFEAPKVGEDQGSPEVTDGPKTEEELLALEKEKPAEEKPKEDKPAAAKPETPKTVTPEWQTVEKKEQKGTVTIREEKGVRYNQLSSTAQNDNAGKPALFEKKGLTVVANGNATVDLTFKDDSEKGKSRFGVFLKFKDTNNNVFVGYDKDGWFWEYKSPTTSTWYRGSRVAAPETGSTNRLSITLKSDGQLNASNNDVNLFDTVTLPAAVNDHLKNEKKILLKAGSYGNDRTVVSVKTDNQEGVKADDTPAQKETGPVVDDSKVTYDTIQSKVLKAVIDQAFPRVKEYSLNGHTLPGQVQQFNQVFINNHRITPEVTYKKINETTAEYLMKIRDDAHLINAEMTVRLQVVDNQLHFDVTKIVNHNQVTPGQKIDDERKLLSSISFLGNALVSVSSDQTGAKFDGATMSNNTHVSGDDHIDVTNPMKDLAKGYMYGFVSTDKLAAGVWSNSQNSYGGGSNDWTRLTAYKETVGNANYVGIHSSEWQWEKAYKGIVFPEYTKELPSAKVVITEDANADKKVDWQDGAIAYRSIMNNPQGWEKVKDITAYRIAMNFGSQAQNPFLMTLDGIKKINLHTDGLGQGVLLKGYGSEGHDSGHLNYADIGKRIGGVEDFKTLIEKAKKYGAHLGIHVNASETYPESKYFNEKILRKNPDGSYSYGWNWLDQGINIDAAYDLAHGRLARWEDLKKKLGDGLDFIYVDVWGNGQSGDNGAWATHVLAKEINKQGWRFAIEWGHGGEYDSTFHHWAADLTYGGYTNKGINSAITRFIRNHQKDAWVGDYRSYGGAANYPLLGGYSMKDFEGWQGRSDYNGYVTNLFAHDVMTKYFQHFTVSKWENGTPVTMTDNGSTYKWTPEMRVELVDADNNKVVVTRKSNDVNSPQYRERTVTLNGRVIQDGSAYLTPWNWDANGKKLSTDKEKMYYFNTQAGATTWTLPSDWAKSKVYLYKLTDQGKTEEQELTVKDGKITLDLLANQPYVLYRSKQTNPEMSWSEGMHIYDQGFNSGTLKHWTISGDASKAEIVKSQGANDMLRIQGNKEKVSLTQKLTGLKPNTKYAVYVGVDNRSNAKASITVNTGEKEVTTYTNKSLALNYVKAYAHNTRRDNATVDDTSYFQNMYAFFTTGADVSNVTLTLSREAGDQATYFDEIRTFENNSSMYGDKHDTGKGTFKQDFENVAQGIFPFVVGGVEGVEDNRTHLSEKHNPYTQRGWNGKKVDDVIEGNWSLKTNGLVSRRNLVYQTIPQNFRFEAGKTYRVTFEYEAGSDNTYAFVVGKGEFQSGRRGTQASNLEMHELPNTWTDSKKAKKATFLVTGAETGDTWVGIYSTGNASNTRGDSGGNANFRGYNDFMMDNLQIEEITLTGKMLTENALKNYLPTVAMTNYTKESMDALKEAVFNLSQADDDISVEEARAEIAKIEALKNALVQKKTALVADDFASLTAPAQAQEGLANAFDGNVSSLWHTSWNGGDVGKPATMVLKEPTEITGLRYVPRGSGSNGNLRDVKLVVTDESGKEHTFTATDWPDNNKPKDIDFGKTIKAKKIVLTGTKTYGDGGDKYQSAAELIFTRPQVAETPLDLSGYEAALAKAQKLTDKDNQEEVASVQASMKYATDNHLLTERMVEYFADYLNQLKDSATKPDAPTVEKPEFKLSSLVSEQGKTPDYKQEIARPETPEQILPATGESQSDTSLFLASVSLALSALFVVKTKKD

SEQ ID NO: 9 - protein, 1325 aa, Streptococcus pneumoniae
MRVSSDTNIYEYRALSPQQKAALEMIRADLYKFTVPYENLEYRFYKPDWVFGLGYQALATVRWKIEPATITVTKKWENVKEGAKKPDVWIQLLKDGKPEGERKRIESDKGQTTFEIPNKDEINKYSVKEVDKEGRDWKHKDFTAGQPVNKGNGHFEITNTKKEKPKIKVTFKKIAGDTNKDLAGAHLVLKKIFDDGNGLLIKQWDTIGQPVDIDLDAGSYTLTEEKAPDGYMLAAPVSFYVEEDGQIILPKGEDLEAQNDKTITMVDEKIKEKPTKPSGKLATTVEVDGTKADAQKELELSVATDKVTKTVKDTVVYENLLAGETYKLTGQLMKITADKEEEVATKETTFVADASGNGTTSLEFEDVSLEAGVKYVVYETAESEKEIDFKEGKEKHKVEHKDKDDKAQTVVVTKEKPTKPSGKLATTVEVDGTKADAQKELELSVATDKVTKTVKDTVVYENLLAGETYKLTGQLMKITADKEEEVATKETTFVADASGNGTTSLEFEDVSLEAGVKYVVYETAESEKEIDFKEGKEKHKVEHKDKDDKAQTVVVTKEKPTKPSGKLATTVEVDGTKADAQKELELSVATDKVTKTVKDTVVYENLLAGETYKLTGQLMKITADKEEEVATKETTFVADASGNGTTSLEFEDVSLEAGVKYVVYETAESEKEIDFKEGKEKHKVEHKDKDDKAQTVVVTKEKPTKPSGKLATTVEVDGTKADAQKELELSVATDKVTKTVKDTVVYENLLAGETYKLTGQLMKITADKEEEVATKETTFVADASGNGTTSLEFEDVSLEAGVKYVVYETAESEKEIDFKEGKEKHKVEHKDKDDKAQTVVVSKIKPEPGAQEVHFSKVNVGGEEIAGAEIHIKQGDTVVASWVSEAGKTHTLKLKPGHYIFHEAVAPGGYLAVTDIHFSVDETGQVTVTDVNGNTAVAEGNKLTVTDQTKPVTPPSPEEPGAQEVHFSKVNVGGEEIAGAEIHIKQGDTVVASWVSEAGKTHTLKLKPGHYIFHEAVAPGGYLAVTDIHFSVDETGQVTVTDVNGNTAVAEGNKLTVTDQTKPVTPPSPEEPGAQEVHFSKVNVGGEEIAGAEIHIKQGDTVVASWVSEAGKTHTLKLKPGHYIFHEAVAPGGYLAVTDIHFSVDETGQVTVTDVNGNTAVAEGNKLTVTDQTKPVTPPSPEEPGAQEVHFSKVNVGGEEIAGAEIHIKQGDTVVASWVSEAGKTHTLKLKPGHYIFHEAVAPGGYLAVTDIHFSVDETGQVTVTDVNGNTAVAEGNKLTVTDQSADKDKQDKLPNTGETTGTYLSILGMITAVFASLLYRSKKK

SEQ ID NO: 10 - protein, 5 aa, Streptococcus pneumoniae
LPNTG

SEQ ID NO: 11 - protein, 5 aa, Streptococcus pneumoniae
  misc_feature 3: Xaa is any amino acid
YPXTG

SEQ ID NO: 12 - protein, 5 aa, Streptococcus pneumoniae
  misc_feature 3: Xaa is any amino acid
IPXTG

SEQ ID NO: 13 - protein, 5 aa, Streptococcus pneumoniae
  misc_feature 3: Xaa is any amino acid
LPXSG

SEQ ID NO: 14 - protein, 5 aa, Streptococcus pneumoniae
  misc_feature 3: Xaa is any amino acid
VVXTG

SEQ ID NO: 15 - protein, 5 aa, Streptococcus pneumoniae
  misc_feature 3: Xaa is any amino acid
EVXTG

SEQ ID NO: 16 - protein, 5 aa, Streptococcus pneumoniae
  misc_feature 3: Xaa is any amino acid
VPXTG

SEQ ID NO: 17 - protein, 5 aa, Streptococcus pneumoniae
  misc_feature 3: Xaa is any amino acid
QVXTG

SEQ ID NO: 18 - protein, 5 aa, Streptococcus pneumoniae
  misc_feature 3: Xaa is any amino acid
LPXAG

SEQ ID NO: 19 - protein, 5 aa, Streptococcus pneumoniae
QVPTG

SEQ ID NO: 20 - protein, 5 aa, Streptococcus pneumoniae
  misc_feature 3: Xaa is any amino acid
FPXTG

SEQ ID NO: 21 - protein, 5 aa, Streptococcus pneumoniae
  misc_feature 3: Xaa is any amino acid
VTXTG

SEQ ID NO: 22 - DNA, 6 bp, Artificial Sequence
  CpG motif
gtcgtt

SEQ ID NO: 23 - DNA, 6 bp, Artificial Sequence
  CpG motif
ttcgtt

SEQ ID NO: 24 - DNA, 24 bp, Streptococcus pneumoniae
gctggatcgagtttgaaaccagaa

SEQ ID NO: 25 - DNA, 24 bp, Streptococcus pneumoniae
taaggatcaccaaagtccaaggca

SEQ ID NO: 26 - DNA, 25 bp, Streptococcus pneumoniae
tttcagtgtatgttttagtgcttca

SEQ ID NO: 27 - DNA, 25 bp, Streptococcus pneumoniae
atggcttcaggggctatgttcggtg

SEQ ID NO: 28 - DNA, 43 bp, Streptococcus pneumoniae
  misc_feature 1...43: N is any nucleotide
nnnnncattccattcattaattaattaatgaatgaatgnnnnn

SEQ ID NO: 29 - protein, 49 aa, Streptococcus pneumoniae
MEMSFIAQDFDKLNIITVLESRTQAIIRNPMNTRLSSDTESSFNKIVRN

SEQ ID NO: 30 - protein, 68 aa, Streptococcus pneumoniae
MELAETSIVKKNHQIPCIINQKIAQKLIKKTSMTDIDHQLSISTSTVIRKINDFHFEHDFSRLPEIMS

SEQ ID NO: 31 - protein, 43 aa, Streptococcus pneumoniae
LFKIGRVYYRQLQEDLLTCCNKYPKLFFFIIISLNSTQSGGVF

SEQ ID NO: 32 - protein, 382 aa, Streptococcus pneumoniae
MKYNKTKYPNIYYYETAKGKRYYVRRSFFFRGKKREKSKSGFTTLPQARAALVELEQQIQEQELGINTNLTLDQYWDIYSEKRLSTGRWNDTSYYLNDNLYNNHIKAKFGSILLKNLDRNEYELFIAEKLQNHTRYTVQTLNSSFMALLNDAVKNGNLLSNRLKGVFIGQSDIPAANKKVTLKEFKTWIAKAEEIMPKQFYALTYLTIFGLRRGEVFGLRPMDITQNDSGRAILHLRDSRSNQTLKGKGGLKTKDSERYVCLDDIGTDLIYYLIAEASKIKRKLGIIKEQHKDYITINEKGGLINPNQLNRNFNLVNEATGLHVTPHMMRHFFTTQSIIAGVPLEQLSQALGHTKVYMTDRYNQVEDELAEATTDLFLSHIR

SEQ ID NO: 33 - protein, 307 aa, Streptococcus pneumoniae
MSYSYVALDVETANDFRGSVCSIGLVKFKDGNIVDTFYTLINPEEEFDDFNIFIHGITPEDVLDSPTFPEVRKSIVDFIGLDIVVAHFAQFDMGALKDVYQKYELDFDNIEYICSYRLAKVALPGQLNYKLKRLAKNLNIELDHHNALSDARASGLILEYLLSTNSFSDLTAFLKEYRYNKTGLLGQYGFKRKKGYQYKENLIYQPTEEEKAAMNPDHYFYGLYFCFTGKLERMTRKEANKAAALVGGIPEKGVTKHTNILVVGEQDWRVVGTDGLSSKMKKAQTLLEKGQDIEIMTENDFIRLLEE

SEQ ID NO: 34 - protein, 43 aa, Streptococcus pneumoniae
MSLLSLHQCKVFLFYHDFISHGFKIVVGHEFEVIKLCGVIQAF

SEQ ID NO: 35 - protein, 86 aa, Streptococcus pneumoniae
MKNKKPNAERLQEIADYFNVSTDYLLGRTDNPAIAGDSKEYTWQGKTLNVEEMASNVMMFGGRELTDEKKKIIQSIIEGYLKEAGD

SEQ ID NO: 36 - protein, 73 aa, Streptococcus pneumoniae
MSKLTKEDVLQVSQEIINDAIPVIKDMLDEVFKEYPIDMEIRKAILNSVLVAHKLSTETTVSLLTELVNAQEN

SEQ ID NO: 37 - protein, 67 aa, Streptococcus pneumoniae
MSKELKIIKAKIKTRLIELDMTQAELAKQVSVASSVISELLKYGKGSESVKEKVADVLGIENPWENS

SEQ ID NO: 38 - protein, 141 aa, Streptococcus pneumoniae
MDYQILIQPAISVILAIISGLWSYIASKANNKAEIEKQAKEHSHIVEKLEKEFHYQIDTLKQQHTLELEKVKQAHELRLQELEKVSQIDTETDKAMKMNDLIYKTFTGEVDLDKALKLADKANNHKQKLNKKFIQKTSKKS

SEQ ID NO: 39 - protein, 236 aa, Streptococcus pneumoniae
MNEIFNFHGQEVRTLTIDDEPWFVGKDVADILGYSKARNAITLHVDEEDALKQGIPTSGGTQDMLIINESGLYSLILSSKLPQAKEFKRWVTSEVLPAIRKQGGFIREDLDEDAFIALFTGQKKLREQQATMLEDIDYLKSEQPIHPSYAQSLLKKRKARVVACLGGIDSPAYADKVFAQSVFRQAEIDFKDHFNISRYDLLPKKHADAALAYWMTWEPSTNTKMKIMKLNSFDDV

SEQ ID NO: 40 - protein, 106 aa, Streptococcus pneumoniae
MFEPPILDQLMGVGALLLGFAGACRHIKLQEQRKEEERREEQEFASMIIQGYNHAYERGREAERQEIRKNIRRPFKGFTYDNEPPQGLRPEPLALPEPKQSAIRLL

SEQ ID NO: 41 - protein, 98 aa, Streptococcus pneumoniae
MEELIESLDNLIMIVKELEGRESTSRHFITIWENDYKNLLLVKEYLTDYEKLAKDYRYVTLKNKLLKIEKMELEGRHIYEDMRMKYRANRRKWGARYV

SEQ ID NO: 42 - protein, 271 aa, Streptococcus pneumoniae
VLGMSEIKWIKITTDIFDDEKICLIDALPDPDAILVIWFKILTLAGKHNSNGLLMMTDKVHYTDEMLATIFRRPLNTVRMAIGVFEQFGMIEIIDGIISLPNWEKHQNVDGMEKIKEQTRNRVAKYRKKQKNLALGNVTGNVTVTDGNALEEDKDKNKNRLDKDKNKKRITTTSSGSEENILELFQSEFRRLLSGFEIEEINHLLNENDVDLVKEALKTAINSGKPNIKYIGGILRNWQMNNVTTVEQVRQSEKKNKDKKEEQEAKDEWGY

SEQ ID NO: 43 - protein, 262 aa, Streptococcus pneumoniae
MRRSASMVDNVFEEIALSYRRNTEQQEEFCEKHNIPLIKILRTESVVCRMCESERIHEENQERVNELANAENERERKYYLEKFSLYDEVLKNATLDNFETPTEKEAEKLAFAKRICREWSEGARNNIVLQGEAGTGKSHLAFAMVKVLSEYTKEIAIFINVTDLLMKIKADFSQEEFLVNKIASAKFLVLDDLGMEKDSEWSFTILYNILNKRSNTIITTNLISADIQKRYGRPFMSRLMKGVDKDHLMVFNDLTNKRKQYF

SEQ ID NO: 44 - protein, 72 aa, Streptococcus pneumoniae
MLELYFVYNGHCKFFLGRFDNVDDLIEQMEDHQWAFSAITHPRFQKHIGQRTTRFDYGSKDCYYLATFSGGE

SEQ ID NO: 45 - protein, 55 aa, Streptococcus pneumoniae
MVGVTYQEIHLFVEFLKEQYGQGRPDYIEALNDLDGLVEVSYREAIERFLEDEVR

SEQ ID NO: 46 - protein, 105 aa, Streptococcus pneumoniae
MMEELKKKVNAVYNWTVEDGKPQPPQQDLPQAVKDRVDYFWEMAEDGMTFMGAMECIFADEKPTDYELGATKGWLPKSKEFDDWIGYSPSMAQVVIAVYLIYGGN

SEQ ID NO: 47 - protein, 41 aa, Streptococcus pneumoniae
MEETKMNKQELIKKLEERRTIIGNFQGYAVSYFWIYWIVEK

SEQ ID NO: 48 - protein, 180 aa, Streptococcus pneumoniae
MEFVSPIKDNDDIQAMKDYLREWNEMYYMLFITGLNTGLRVGDILTLKVKDVQGWHIKLRERKTGKQITRRMTKELKKEMRRYVEGKPFHHFLFKSRQGQNKAITRERAYQIIHEAAEELGIDNVGTHTMRKTFGYKYYNKTKDVGTLQKMFNHSSPAITLRYIGIEQAELDDALRNFVI

SEQ ID NO: 49 - protein, 106 aa, Streptococcus pneumoniae
MYNKPVRPSLKSKKWEKFRDRIMRKHDYLCQESLRYGISVQAEMVHHIFPVSEYPELEFVEWNCLPLTNKKHNTFHDRVNDRVINQGLYWQKKRKKEFLNFFKNEK

SEQ ID NO: 50 - protein, 130 aa, Streptococcus pneumoniae
LAKPITAKSIKSKVVKQMKDLGTYRKEFEMIIDIFAGMLYQYQKLAQDYANLGYPVTDTYVNKAGAENERKVPILTAMEILRKDILSYSNQLMMNPKSLGEVVEQEGDSVLTEVLKFKNEIKKKRVSGNG

SEQ ID NO: 51 - protein, 576 aa, Streptococcus pneumoniae
MGNLDKAKEYAQHVLTHREEHCEENILAAERFFRDLENPAFEMDEDMVDFVIHFIENVIVHQQGDDMFAVSIRNKPLLLQPWQHFVVVNLFGFYYKGTNERRFKEALIMLARKNGKTSFTAAIALAYQILDTDSGSKCYIVANSVKQAMEAFGFLRFNVERWNDKNIRIKDNNQEHSITANFGDEGSFFIQALANDESRLDSLNGNVIILDEAHTMRNSKKHGLMKKTMSAYRNSMLFVISTAGDIPTGFLANRLKYCQKVLKQLVTDDSFFIFICKANQSADGDVVNYLDENILKMANPSWGVTVSLKALKEEAEQAMNDPQTRNEFFNKTLNIFTNSMNAYFNPDEFIASDSCYDWSLEELARLPIRWYGGADLSRLHDLTAAALYGVYHDGEKDVDICITHAFFPRINAQKKANDDGIPLFGWQSDGWLTMSNTPTVLYDDIVKWFIKMREKGFKIAAVGMDRKFGREFLTKMKQARFKMIDQPQLFYLKSEGFRRIEFKVKNKEFYYLHSDAYEYCVSNVRAIEKVDDAVQYEKLDGDGGTARIDLFDASVFACIQALANLGKGGDVMRFFD

SEQ ID NO: 52 - protein, 72 aa, Streptococcus pneumoniae
MNEIVLSEHEINLLINKGRVKVILNGEVVTIRQRHMKNLMAETVKWEKQVIDVSQNIVRNKHFDSLFQNTFR

SEQ ID NO: 53 - protein, 400 aa, Streptococcus pneumoniae
MGIFEKFWKRNKPSKPINMLSHSDLGLSNLMDSYVPLARNPDVVTAVNKIADLVSNMTIHLMENTDKGDIRIRDGLARKIDINPCKHMTRKSWIFKIVRDLLLYGDGNSVLHVEYEPVTDYISNLRPFPMREVSFQTDKDSYVISFRGEEYSPDEVVHFVINPDPDILYIGTGFRVTLTDVVQSLNMATKTKKSFMNGKNIPSLIVKVDSSSAELDSEQGRERIAEKYLSTSRVGAPWIVPEALLDIQQVKPLSLTDIALNESVELDKRTVAGLLGVPAFILGVGEFNKTEYNNFVNTTVMSIATTITQTLTRDLLLSSNRYFKLNPRSLFSYNITELSAVAQQMANSAAMRRNEWRDWLGMAPDPEMEELIVLENFLPQEKLGDQNKLKGGEEENAKAK

SEQ ID NO: 54 - protein, 191 aa, Streptococcus pneumoniae
MQKRNSYRATQFQTREEESGDLVLSGYFIKFDEETELWRGYHEVIKRAGVEKAVTDADIRALFNHDDSLVLGRTGNGTLTLGVDDVGLFGDIIINKDDPQAVGAYARVKRGDVIGCSFGFIPVKIETEEREDGSYLDTVLELEIFEVSPCTFPAYPQTEIAARQKDFESQKRANREALDKRKKEIKEKFKL

SEQ ID NO: 55 - protein, 388 aa, Streptococcus pneumoniae
MNKALIFGARMRAKATKVVELEETIEELNKRSVVELEKLDRAKNDEEVLAVEKTVDGLQREIEEKEAEKVQLENEIDELDKQIKEQNRKAPTPGKMEERGGKTLGQREAFNHYLRTKEARADGFKSAEGEAIIPVELMTPKEAKQDKTDLTSLVNIVNVKNASGKWSVVKLTDQAMNTVEELEENPELAKPTFTKVNYEIKTRRGHLPVSQEFIDDADYDVMGLVAKQTKNQERITKNKEIAKVLKTATSKSAAGLDGLKDILNVELKTYYNATIVCTQSMFAALDKIKDKDGRYMLQTDITSPTGYKFAGRVIVVYPDDIIGESKGDLKAFIGDVGEFATLFDRAQTTVKWQDDKIYGQYLATANRFDVVKVDGDAGFYVTYTDAVL

SEQ ID NO: 56 - protein, 37 aa, Streptococcus pneumoniae
LMNVEDKDMSKDDTLTTEVEKEETKVVDGKPEEGDEE

SEQ ID NO: 57 - protein, 93 aa, Streptococcus pneumoniae
MDNVQLLELLKLKLGIATKLRDKPLEKIIEAVKTELEDNLGVLLDLDSSEDQMFVVDFAAFRYEGGVDMPRHLQWRLHNLQIASKKKVKNVES

SEQ ID NO: 58 - protein, 99 aa, Streptococcus pneumoniae
MWNHEIKLISKKITGKDKLLQPISEDVEVTLLCRKKNVTRSEFYQANQAGLKPSLVVEIRNFEYENQEFAKFEGKQYRILKTYPIDSEILELTLTEVLK

SEQ ID NO: 59 - protein, 115 aa, Streptococcus pneumoniae
MSNDLADLIAKELAAYSDEVTEEVDKIAEQVTDETVDELKETSPKRYGKYRRSWKKKKLANGSFVVFNAVASLTHILENGHLSRNGGRVAGIVHIKPAEEKAIQNFEKRIKEIGK

SEQ ID NO: 60 - protein, 107 aa, Streptococcus pneumoniae
MKLSDFAAILEQANLPVTYRAFKIGNAPDLPYLVYYESSPVINSADNTVNHQIKSVTVELAFESKDEDLEERLEELWANHKLFFEVQEETFIETERLYVKSYTVYLY

SEQ ID NO: 61 - protein, 192 aa, Streptococcus pneumoniae
MTQENKVTFGLENVHIAPIKTLAADGVITYGDVFRFPGAMELILDTKGETTPIKADNKNYHFMNSNEGYEGKLKIPHIIDEFATKILGEIKDPQTGVMTEKADASLTEFAIMFQFEGDKNKTRYVMYYCFASRPSLGSKTKNGTSTNERELSFKASPRPLDTVVKRSITSADDKDAYDNWFKKVYEPTAVAA

SEQ ID NO: 62 - protein, 139 aa, Streptococcus pneumoniae
MRKIVLVGDQEYELGTNGYTPIAYKQQFGKDYFQDLFSMLKNQSFMNELNKLETDKELTATNIDISMLSDFDMTFFNRLFWTFAKSANPQIKPYEQFFMEMEIFPIQEVGPVLMEMLNASMTTKKHQMNQNQLAKKSSQ

SEQ ID NO: 63 - protein, 1031 aa, Streptococcus pneumoniae
MAGNIKGIKIEIDGDTQPLQKALKAINKESVNTTNELKQIDKALKFDTGNVILLTQKQEVLQKQIGITRDKLETLRQAQSKVDEEFKKGNIGSEQYRAFQREVEVTQNVLKGYEGKLASLTQALEGNGDAAKNNQAQLKELQNEQKLLASESEKVVSSFKLQESQMGANASEADKLALAEKKIGAQSEIVTRQIENLEKQLSLTKEQYGENSAEANKMEAELNQAKTAYANLNQELGKLGSTAKSNQTQLKELQNEQSQLASEMSKVTSSFKLQESALGSNASEAERNALAQKKIGAQSEIVSKQISNLEQQLEITKKEFGENSTQANKMESELNQAKTAFNHLNDEMKGTKSAADSTQESLSEISRNLRAELLQQFSEKLSAISEKLVEVGKEALEAAAQMQASNAQFTTVFGDMETQAREALNAIGQEMDIVPERLQGSFTQMASFAKTSGLDTAEALDLTSRATRAAADGAAFYDKSIESVTESLQSFLKGNFANDAALGISATETTRNAAANKLYGKSFKDLSEAQKQLTLLQMVEDGNKLSGALGQAARESDGLENVMGNLKQAGTNALSAIGQPLLEMMIPVFQTLATIVKGVAELFSSLPAPVKDFVVILGTVVTAVGVIAPIFLSLQALAEFLKISIGEMIIAALPIIGTAIAIAAAVAAIVAIVKYLWETNEGFRDAVTTVWNAILEVINAVVSEISNFVMSIFGTVVTWWTENQELIRTSAETVWNAIYTVISTILDILGPLLQAGWDNIQLIITTTWEIIKIVVETAINVVLGVIQAVMQIITGDWSGAWETIKGVFSTVWQAIQSIVQTIFSAIQSYISNILNGISGTVSNIWNSIKDTVSNVLNAISSTVSSVWEGIKSTISSAINGARDAVSSAIEAIKGLFNFNISWPHIPLPHFYVSGSANPLDWLSQGVPSIGIEWYAKGGIMTKPTIFGMNGNNIMVGGEAGNEAVLPLNDKTLGAIGRGIAQTMGGTSPTINITITGNTVREEADISRIADEVAQRIADELQRKTQLRGGFT

SEQ ID NO: 64 - protein, 240 aa, Streptococcus pneumoniae
MIKHNELVIDGVRTSSFPFKVIVHDSPSIALGESKTALLEHGGISGAIVQTNKHRELVKKTYTIYLVKPTEEQMNQFMSLFIREKFWLESERVKTTRLWCYKVNVSDLEEVQPGLYMTKATFTCHPTKHFKVTDTQRLTRSGTLNVQGSALAFPKITIVGQSASETSFTIAGQVIRLERLTESLVMVNNPDNPSFKTTTGKPVKWSGDFITVDPAKVKNIGVVLGPGIQSLEIETVWGWA

SEQ ID NO: 65 - protein, 2210 aa, Streptococcus pneumoniae
LLYLLNEDVRTVRWNGESLHEATSAIVKETMNGDFTLTVKYPISDSGIYQLIQEDMLIKAPTPVLGAQLFRIKKPVEHNDHLEITAYHISDDVMQRSITQMSVTSQSCGMALSRMVQNTKTALGDFSFNSDIQDRRTFNTTETETLYSVLLDGKHSIVGTWEGELVRDNFAMTVKKSRGENRGVVITTHKNLKDYQRTKNSQNVVTRIHAKSTFKPEGAEKETTIRVTVDSPLINSYPYINEKEYENNNAKTVEELQKWAQSKFSNEGIDKVSDAIKIEAYELDGQVVHMGDTVNLKSWKHNVDAFKKAIAYEFDALKEEYISLTFDDKAGIGGSRASGGLSSAADAILGVTESAQEIALEKALQNADLDFDHKAGLLRQEISDDIELAKARAEEVKRELSDTINQRFNSFDNGPLKETKRKAEEALRNAGASSSLAQESKRIGLDSVARLEAFKSQTTSAQTALSGDLDALKRTIANDIRPKQAQAEAEIAKQVEALSRTKNELAGASTLLAQEAKRIELDSVARLEAFKSQTTSAQTALSGDLDALKRTIANDIRPKQAQAEAEIAKQVEALSRTKNELAGASTLLAQEAKRIELDSVARLEAFKSQTTSAQTALSGDLDALKRTIVNDIRPKQAQAEAEIAKQVEALSRTKNELAGVKSAQATYKETTTRRLSELTNLANGKASKSELTQTAEELSSKIASVQASGRNLFLNSLFKQDIPKTGIWTTSTYTATIDSESKYLGHKALKIIGLNPSGRDGGNPKVTYPALGQFGKVIPGSTTNQDVTISFYAKANKNGIMLRSRLGNIGYKTGNVTLSTEIKRYAVHIPKGWTNESKRTTNEWLFNFNQEGTVWIWMPKFEISDVDTSYSEAPEDIEGQISTVESTFKQRANSLEAGVSRLTEGLRTKADISSLNVTAENIRQSVKSLETDTQNKLNQKLSQAEFEVRAGSIRQEILNATKDKADKTLVVSEAGKLREEFSKMKVGGRNLWIKSKTVGAVIEKLPENHVTGQKECYRLENNSTLTFNLEPDFSSRLYQKVTFSAWIKYENVVQGRNFWNVFNCFKHYLFRKNSETGVQSGPDYDTLGRYKGSADWKYITFTYDYSEKTNFDQLKTLLRFNLEGATSGTAWVTGIKVEIGSVATDWSPAPEDADGLITEAKATFERTAQGLRTDLSAITEGLRTKVDISALNVTAENIRQSVKSLETDTQNKLNQKLSQAEFEVRAGSIRQEILNATKDKADKTLVVSEAGKLREEFSKMKVGGRNLWIKSKTVGAVIEKLPENHVTGQKECYRLENNSTLTFNLEPDFSSRLYQKVTFSAWIKYENVVQGRNFWNVFNCFKHYLFRKNSETGVQSGPDYDTLGRYKGSADWKYITFTYDYSEKTNFDQLKTSLRFNLEGATSGTAWVTGIKVEIGSVATDWSPAPEDADGLITEAKATFERTAQGLRTDLSAIQEYVNKDGQRQEALQRYTREESTRQATAVRELVNRDFVGKATYQEDVKGINQRIEAVKTSANKDIASQIASYRQSVDGKFTDISSQITTYKQDVGGQISGLSNRLTSSEQGTTTQISNLSNRINSNKQGTDNQISNLKTQVATNKDNAERQMGRISDQVSANKANADSQFANVTNQLARKVETTDFQRVKETSKLYERILGNTENGIADKVARMALTNQLFQVEVAKNASNGQNLLKGTKDFSGGWKNKGANWKKHAEKYKGVDVLFKNNSWNGVGQEIDAKIGEVYTFSLWMKSDWKNDTVNFYVNRNGSVEKGWGVPSETSVAITSEWKRYSFAFKITVDGFIFPRVERLNQNTNLYIAGLKLEKGSYATPYTEAPEDTDEAIRSVQSQLTGSWAVQNINSAGDIISGINLGANGHNRFVGKLTHITGETLIDRAVIKSAMVDKLKTANFEAGSVTTTILDAEAVTADKVRFDAAFIRKMTANDAFIDQLTSKRIFSTKVESVISSSTFLEAYQGRIGGFTIGRFAQGRGRWISGINQFSVGMGNGEGGSYNGENTAFWANWGHSWNSPGPNAWYVTTSGNMYCRNGADFHGKVDFSNSSRANFYGNTTFSRSPVFSNGIELGSKDVLGDGWNPKGGRNAVVWWNQVGSGSVKYWMEQKSDRRLKENITDTAVKALDKINRLRMVAFDFIENKKHEEIGLIAQEAETIVPRIVSRDPENPDGYLHIDYTALVPYLIKAIQELNQKIEKMEKTIA

SEQ ID NO: 66 - protein, 67 aa, Streptococcus pneumoniae
MNTEQLNQALQMTIREMSTTSTNSMITSNILSIQLNEQREENQRLQARVDELEALLDEQTKPADKGE

SEQ ID NO: 67 - protein, 116 aa, Streptococcus pneumoniae
MAETIQNTDNLLDLTKITEPFDLASALRYMKENGEFIRCKNVSDDFYMYRDVQKRPVIVNGRRQFKDIETVWAFNQWGGTITTINVAVLLNHEFYIMKFDAEGNPDWTNPTVEPKE

SEQ ID NO: 68 - protein, 39 aa, Streptococcus pneumoniae
MQIEFFNFLRSVVQTEDGLVLYALALIVSMEIIDFVTGH

SEQ ID NO: 69 - protein, 69 aa, Streptococcus pneumoniae
MILIPASVLLPEKTGFVFLHSIYLGYIAFTFQSLIENYRKLKGNVTLFQPIVKVFQRLLEKDDDTKKGE

SEQ ID NO: 70 - protein, 110 aa, Streptococcus pneumoniae
MQQITEIITNGAISILVILAGIAVKAVKEYLVKKGGEKTIKIVEILAKNAVNAVEQVAAETGYKGDEKLAQARAKVRAELTKYNISMTDKDLDTFVESAVKQMNDAWKGR

SEQ ID NO: 71 - protein, 39 aa, Streptococcus pneumoniae
MAFNQFNRCVTLSIPTAPNIPTSVVHRTYLHDTAVSDNM

SEQ ID NO: 72 - protein, 47 aa, Streptococcus pneumoniae
MKNREEEWQGIIAKNAILLIIAPFYFLIIVKNGVLLKIKTVTEITAF

SEQ ID NO: 73 - protein, 420 aa, Streptococcus pneumoniae
VEEVEVAEVKNARVSLTGEKTKPMKLAEVTSINVNRTKTEMEEFTRVLGGGVVPGSLVLIGGDPGIGKSTLLLQVSTQLSQVGTVLYVSGEESAQQIKLRAERLGDIDSEFYLYAETNMQSVRAEVERIQPDFLIIDSIQTIMSPEISGVQGSVSQVREVTAELMQLAKTNNIAIFIVGHVTKEGTLAGPRMLEHMVDTVLYFEGERHHTFRILRAVKNRFGSTNEIGIFEMQSGGLVEVLNPSQVFLEERLDGATGSSIVVTMEGTRPILAEVQALVTPTMFGNAKRTTTGLDFNRASLIMAVLEKRAGLLLQNQDAYLKSAGGVKLDEPAIDLAVAVAIASIYKDKPTNPQECFVGELGLTGEIRRVNRIEQRINEAAKLGFTKIYVPKNSLTGITLPKEIQVIGVTTIQEVLKKVFA

SEQ ID NO: 74 - protein, 62 aa, Streptococcus pneumoniae
MGVSIFLALFYMIPALYFLFHIGKKWELPKKVLILSLLGAICSFTSLLLFGIYNHRRKSSKV

SEQ ID NO: 75 - protein, 64 aa, Streptococcus pneumoniae
VFVALVSITFSLTNFFKILINLTAQVSPQVIDEKILMMDLNLNNYLSTVIQLRQDVYTGIKILH

SEQ ID NO: 76 - protein, 58 aa, Streptococcus pneumoniae
VNIASLQNGHIFCWQVQHIANKLTSDFWIAEYFLSNQIISWADARMSENPPIPPSIVS

SEQ ID NO: 77 - protein, 91 aa, Streptococcus pneumoniae
MKIKEQTRKLAAGCSKHCFKVVNGTDEVSSKHCFEVVDGTDEVSSKHCFEVVDRTDEVSNHIYGKATLTWFEEIFEEYKSLHNKTHITKVV

SEQ ID NO: 78 - protein, 92 aa, Streptococcus pneumoniae
MNDDDSRCIHIERDGKTIEFGYLNISSTDRNTSHADGLVGIFNSNFSGVRVRGIAVFLNGPDNLDTTLVGNFQTIWNFRIICIHSQNTCNKG

SEQ ID NO: 79 - protein, 46 aa, Streptococcus pneumoniae
LEFNFCRSIIKNGRDNLPNTNSTSGMATRWANHNWSDDIKDRLKTK

SEQ ID NO: 80 - protein, 59 aa, Streptococcus pneumoniae
MRYDFGKVYKEIRESKGLTQEEVCGNVISRTSLSKIESGKATPKYENMEFLLRQINMSF

SEQ ID NO: 81 - protein, 195 aa, Streptococcus pneumoniae
MNYNLKYLLSGIFVLVFIGFLVWMRYFNQRKEEEHSDVSFEARLDSEVKTLYKQLGLGEEPHYFLAYRYLHPWFDLAILPPTVEIFLTKIALVMVTPDELLIRNLGNGLTFTSEHHRDLRQGLIRIPKSEMKEFEIRNWKKFFVFGDFLTIKTSQHSYYLQVRDDGLQKGSLSTKHFSDLKSQDFLGLLTDKRTF

SEQ ID NO: 82 - protein, 37 aa, Streptococcus pneumoniae
LSLLDLRGSLCLRIYLHEPLITTVSQDFTSLSDISHF

SEQ ID NO: 83 - protein, 41 aa, Streptococcus pneumoniae
MDFKSFIIGLVVGIFGPYMDDLIRKKFLKSSEKKTEKSVKK

SEQ ID NO: 84 - protein, 37 aa, Streptococcus pneumoniae
MGRFILFENLFKPGQLHLAVDMVTDFVSSIHNLKTVF

SEQ ID NO: 85 - protein, 98 aa, Streptococcus pneumoniae
METSISMADFYGKYQNENLELIDVREAHEFQAGHAPGAKNLPLSTLEQGYKELKPDHEYYVICQGGVRSASTCQFLSSQGLTVTNVEGGMNVWPGQVE

SEQ ID NO: 86 - protein, 50 aa, Streptococcus pneumoniae
LGGKSCLLEDRLCDIAAQTTVAADDVGLFFVQFISFLLDTLSVFDTIVQN

SEQ ID NO: 87 - protein, 52 aa, Streptococcus pneumoniae
MKIKDQTRKLAAGCSKHCFEVVDRTDEVSSKHCFEVADRTDEVSNIYTARRR

SEQ ID NO: 88 - protein, 99 aa, Streptococcus pneumoniae
MKLLSIAISSYNAAAYLHYCVESLVIGGEQVGILIINDGSQDQTQEIAECLASKYPNIVRAIYQENKGHGGVVNRGLAEASGRYFKVVDSDDWWILVPT

SEQ ID NO: 89 - protein, 80 aa, Streptococcus pneumoniae
LKILETLQELESKGQEMDVFVTNFVYEKEGQSRKKSMSYESVLPVRQIFGWDQVGNFSKGQYIMMHSLIYRTDLLRASQF

SEQ ID NO: 90 - protein, 136 aa, Streptococcus pneumoniae
MYYLPVDFYRYLIGREDQSVNEQVMIKCIDQQLKVNRLLVDQLDLSQVSHPKMREYLLNHIEITTVISSTLLNRSETAEHLAKKRQLWTYIQQENPEVFQAIRKTMLSRLTKHSVLPDRKLSNVVYQITKSVYGFN

SEQ ID NO: 91 - protein, 73 aa, Streptococcus pneumoniae
MSLQIKLKKLAKELSKLLKDSNLETVDKDVLENSQEELQKAVLFLADEKGSEHTAAELIDNLKEVIAKLKANA

SEQ ID NO: 92 - protein, 41 aa, Streptococcus pneumoniae
MKIKEQTRKLAAGCSKHCFEVVDKTDEVSYIYLRQGEADAV

SEQ ID NO: 93 - protein, 139 aa, Streptococcus pneumoniae
MSKEKVILAYSGGLDTSVAITWLKKDYDVVSVCMDVGEGKDLDFIHDKALKVGAVESYVIDVKDEFATDYVLVALQSHAYYEQKYPLVSALSRPLISKKLVEIAHQTGATTIAHGCTGKGNDQVEYQIAVAKKANEAKK

SEQ ID NO: 94 - protein, 44 aa, Streptococcus pneumoniae
VLDSLVFMGFSMKLIHDLDTHTTHSTAKMLYNVKAIKNDFSIRE

SEQ ID NO: 95 - protein, 172 aa, Streptococcus pneumoniae
MGQLHFITKLLDIKDTNTQIIDVVNRDSHKEIIAKLDYEAPSCPECRSQMKKYYFQKPSKIPYLETTGMPTRILLRKRRFKCYHCSKMMVAETSIVKKNHQIPRIINQKIAQKLIEKISMTDIAHQLSISTSTVIRKLNDFHFECNFRNLPKIMSWDVETVRGVTVSIGRWR

SEQ ID NO: 96 - protein, 287 aa, Streptococcus pneumoniae
MRYDFGKVYKEIRESKGLTQEEVCGGVLSRTSLSKIESGKTTPKYENMEFLLRQINMSFEEFEYICHLYQPSQRTEIMQTYLNMTSIIGSNSLVHFFETCQDYLKTHHDLPIEEIRDMLEVVIYIRQHGAGELSDHAEQVVKKLWRKIEKQDTWYESDLKILNTILFSFPIEYLHLITGKILQRLEVYKNYQHLYDLRIAILLNLSTLYLYNQDKNMCKQICYTLLEDAKNKKSYDRLAICYVRIGICTDNAKLIQKGFSLLELTEETSMLSHLKKEVETHYQPKKL

SEQ ID NO: 97 - protein, 748 aa, Streptococcus pneumoniae
MNSKELSISMLKKYPCTMQHDQSDCAAAVVSTVLLSYKKELSIMKIREIIGTDMYGTTVSGIVSGLNKLNFTVKAVRVALEDLTPKLTFPAILQVKNDLGQNHFVVLHSIKRNSKFYVADPASGIRKMSSDELGEIYQGITLFMVPNSDFERGKLKGKGLLDLFGRLIFNQKGLISTVILASFVLSIIGILSSLFSKVIMDEVIPYALKNSLYMFLIVFGIVSFLQTLLSAFRQHVLLFLSRKIDIPVLMGYYDHIIHLPYSFFGSRRVGDVLTRFQDAMTIKNVFTSVSISLVMDITLSVISAVVLWTINQSLFLILVFMVIVNIILIYCFKKPYKKINHEQMEANGLLNSQLIESIRNIDTIKSQHDEEQRLNKIEEKFVHTLEIGYKEGVLQNIQSTISSMTSTMGGLLFMGVGALFIIDGKMTIGDLLVFQTLSQYFTEPIQNLVGLQLTFQEVQVAVSRLQELMEVDREDIALDYSIRDFTLCDDIEFKDVTFAYGSRPPVIKDFNLRIKQGEKIAFVGESGAGKSTLVRLLLRFINPSEGKIRIGENDLSDLDYGKLRKKISYIPQTIELFTGTIIDNLKIGNPSVTYEDMVRVCRIVGIHDTIQRLQNRYGSFVEEGGQNFSGGEKQRLAIARALLSKADLYIFDEATSNLDSFSEQIIQDLIFNKIMDKTTIVVAHRLSTILRCDKICFLENGTIVEYGTHEELMAKNGKYARMVGLQSVQVNQQIQSQAVLDTEEVTYG

SEQ ID NO: 98 - protein, 155 aa, Streptococcus pneumoniae
MAKLEVKDNKKLVLKSVICKKLHDTKVEDVDQEINKFHQHLQLLKAQIFGPLIVKSCGTTIHDDGLITTDFEFYIQAHNAQQYSNIYDVQDSISVPYCLYVRFEDSPEYLQYAYSKLDLYVYENDIQTDGIVYTVYVNSSPEKMVVDIFRPIVSL

SEQ ID NO: 99 - protein, 450 aa, Streptococcus pneumoniae
MKLYNKSELRYSRIFFDKRPPAFAFILIISTAIILSGALVGAAYIPKNYIVKANGNSVITGTEFLSAIGSGKVVTLHKSEGDMVNAGDVIISLSSGQEGLQASSLNKQLEKLRAKEAIFQKFEQSLNEKYNHLSNSGEEQEYYGKVEYYLSQLNSENYNNGTQYSKIQDEYTKLNKITAERNQLDADLQTLQNELIQLQQQGDSSSLSDTTSDDDKAKLETKISEITTKIEALKTNITSKNSEIDSQQSNIKDMNRTYNDPTSQAYNIYAQLISELGTARSNNNKSITELEANLGVATGQDKAHSILASNEGTLHYLVPLKQGMSIQQGQTIAEVSGKEKGYYVEAFVLASDISRVSKGAKVDVAITGVNSQKYGTLKGQVRQIDSGTISQETKEGNISLYKVMIELETLTLKHGSETVILQKDMPVEVRIVYDKETYLDWILEMLSFKQ

SEQ ID NO: 100 - protein, 123 aa, Streptococcus pneumoniae
MELVLPNNYVVIDEEEMMYLDGGAIYIPRWAITGAITGAAYAALAAAGGGGLQLVLASYGLRSALVAGIVKGLGVLGIHIGNAFANTVIRSIASAGIGAGADWIFTNIIDGWDGRRDNQLRIG

SEQ ID NO: 101 - protein, 352 aa, Streptococcus pneumoniae
MKDDQKYLLAGLYSLLVAIFYFPLIESKGIFVSILMAVLLLYLIYFIATVIHIVIIKFIRKKSFKYLVLYPFTYDGSWRFQPINLLYFPEMVRDVIPINLVQEYCQGQPYGLLKKMLKRIRLSREISLLLATIIVYFFTHRILPLSVFTFIFSYILLFAQSYLGGNTVWIGNRRLIIDDEFEKILLSKSYIKEISSARYSEYLTCEYKNLTPIILLAIFENLLDSYLIQNQSKVDLDIFYKVLPLLYKEKYTMGFNYFVSLNYLLYKVGFLGIIYDNEALRDLSKQYLNKNISELQDGSFEDGIQDAVASKQIVVINEFIACLNSRCVPSQYDRFFYKDRPYIFSRKSPIKG

SEQ ID NO: 102 - protein, 325 aa, Streptococcus pneumoniae
MKNKRYFFDTILIILLLISTIFCVSPVFIKLDILGTPSHAILTFVLAIPLFYILSQCLHTLLLLVSSIFCKLRPIYFYFIFVIIIGARKYYRILFHQLMGFSPGVAVFYKESQTTKNLFKFYYFLYFTTLISYYFFFTFVYDKPLLLPLIPFSIIIALVQKLYRIENQQLFLLKSKVLTILESKKDCEFNLQDYHEIWKLQSKSELPCVALSYISLIKPYLSESVREQIDLLEVKRFKKINHPISLYGMLDVIKLNLYLRHYNEKNKYESMLKKILEVRPDFVLIEQNIDDSLNSSQPLSLSLAISEIQLLLEVYMGIKHVSIRR

SEQ ID NO: 103 - protein, 300 aa, Streptococcus pneumoniae
MIRKPIIFLLMLPIWGLWIELHLLVSNLQLNLEIPFDFVVSTSLTFFVLILSKIVLDILYALKDLYKKEALITIFPFIFIRRKKVNVRFSPYFSFHRKSLSPDDLRSRIIWSFILEIAIILVFILKIPFAIIMLTTIFFWTIMDINHLVFNKTEFLFNQNKWQKEDSFESDLTKTLKDKIQKSELSYSDLMSLQLYDAMNQSTFLTDSELFEDILKKIEDSHNTLLCTGLVELLLYEMSISNNNNWQEKVDKIRIQLIRINQLDFFYYTSWLRQNFDFCMNREYHKMKSRKLLLSNKKIV

SEQ ID NO: 104 - protein, 117 aa, Streptococcus pneumoniae
MELVLPNNYVVIDEEEMMYLDGGAYLSKRACQGICVALAMSPGTFIALTGAAVLTKKLINYIKVGGLGGWLIGAAAGVLAGAAGRIAYCIGYGALNRGCDISGNPYPWDGFISATVR

SEQ ID NO: 105 - protein, 252 aa, Streptococcus pneumoniae
LGWIHICDSKMSNVDKIRKIHIIVCWVYIFLSFRAIINDTEYFLLIFLAFIYSIVSLPLYSVKNKIVSICLVINSILLMSFPILINKFFPESFSTYIVLISVFITELIIFHLIGKDFDTKLTNEYKKISQFRSKVSQSPWIKYLEISSFILTIFPSILYGTVDNHVLTLIFLIKICVDTTIKFLFIRLFDTSTLMKRRIFFLFALDVIAYLFLGYLLVIQKAGYLFSVLLLFSNFSVPFIKAKEYELFKNSK

SEQ ID NO: 106 - protein, 848 aa, Streptococcus pneumoniae
MNKKKMILTSLASVAILGAGFVASSPTFVRAEEAPQVVEKSSLEKKYEEAKAKYDAAKKDYDEAKKKAAEAQKKYEEDQKKTEEKAKKEKEAAKEVDDASLAVQKAHVEYRKVLDSRNSYRNPSDYAKKLAEADKKITEETTKLTNAQTKFQSIRTTIVVPGQSELAETKKKAEEAKAEEKVAKRKYDYATLKVALAKKEVEAKELEIEKLQDEISTLEQEVATAQHQVDNLKKLLAGVDPDDTEAIEAKLKKGEAELNAKQAELAKKQTELEKLLDSLDPEGKTQDELDKEAAEAELNKKVESLQNKVADLEKEISNLEILLGGADSEDDTAALQNKLATKKAELAKKQTELEKLLDSLDPEGKTQDELDKEAAEAELDKKVESLQNKVADLEKEISNLEILLGGADSEDDTAALQNKLATKKAELEKTQKELDAALNELGPDGDEEETPAPAPQPEQPAPAPKPEQPAPAPKPEQPAPAPKPEQPAKPEKPAEEPTQPEKPATPKTGWKQENGMWYFYNTDGSMATGWLQNNGSWYYLNANGSMATGWVKDGDTWYYLEASGAMKASQWFKVSDKWYYVNSNGAMATGWLQYNGSWYYLNSNGAMATGWAKVNGSWYYLNANGSMATGWVKDGDTWYYLEASGAMKASQWFKVSDKWYYVNSNGAMATGWLQYNGSWYYLNSNGAMATGWAKVNGSWYYLNANGSMATGWVKDGDTWYYLEASGAMKASQWFKVSDKWYYVNSNGAMATGWLQYNGSWYYLNSNGAMATGWAKVNGSWYYLNANGSMATGWVKDGDTWYYLEASGAMKASQWFKVSDKWYYVNGLGALAVNTTVDGYRVNANGEWV

SEQ ID NO: 107 - protein, 57 aa, Streptococcus pneumoniae
MKIRRRYTHIIRIICILTISFKKQFLSSSLSSLTKRVIMNTAQATFNREAHTTFNRE

SEQ ID NO: 108 - protein, 38 aa, Streptococcus pneumoniae
LKKRMNRWQFLLNQSKEMVGILLLKVKEQELIEFVVNL

SEQ ID NO: 109 - protein, 40 aa, Streptococcus pneumoniae
LIKVIKRKAFGFRNFNNFKKRILMTLNIKKESTNFVLSRL

SEQ ID NO: 110 - protein, 325 aa, Streptococcus pneumoniae
MTYNEKRLTNSLERGHMEQLKNTTDLLGLEDKNIKILSVLKYQTHLVVQAKLDSPAPPCPHCQGKMIKYDFQKASKIPLLDCQGLPTVLHLKKRRFQCKNCLKVVVSQTSIVKKNCQISNMVRQKIAQLLLEKQSMTEIAHRLAVSTSTVIRKLREFKFETDWTKLPKVMSWDEYSFKKSKMSFIAQDFESKSILAILDGRTHAVIRNHFQRYQREVRELVEVITMDMYSPYYRLAKQLFPKAKIVLDRFHIVQHLSRAMNRVRIQIMNQFDRKSLEYRALKRFWNPRFFVSRLGLNQSTGLIYYTRIASSSVRNDSISPRFECT

SEQ ID NO: 111 - protein, 67 aa, Streptococcus pneumoniae
MGYSLKKSRTYCEQDPEKVNRFLKELNHLSYLTPIYIYETGVETYFYLEYDRALSRQLVSLEEDIII

SEQ ID NO: 112 - protein, 248 aa, Streptococcus pneumoniae
LREGCSIYDNLYPSRIVVGDETVEGRKIAELFLSISTHSTANIKNVMLVSPTEAEAIKLFSNTFLALRVAFFNELDFFAERRSLNAEVVIKGVCLDPRIGNFYNNPSFEFGGYCLPKDTKQLKKEFIEINAPVIEAIDISNTNRKQFIVKQILERKPKIVGIYKLGMKYNSDNYKESAILSIINELLIVGIKILVYEPNLNVSIDNVIFEKNFELFTKQSDLIVANRWDRGLEAYKDKVYTRGIWIRD

SEQ ID NO: 113 - protein, 65 aa, Streptococcus pneumoniae
MLNLQFAETMELTEAELETVYGGEFGNNAVIPAGAWGGLGTSWSITNFWKKYFNHDSSTVNRRHY

SEQ ID NO: 114 - protein, 64 aa, Streptococcus pneumoniae
MKIKEQTRKLAAGCSKHRFEVADRTDEVSSKHCFEVVDRTDEVSNHTYGKVKLTWFEESFEEYK

SEQ ID NO: 115 - protein, 38 aa, Streptococcus pneumoniae
LNTSYSFGKKDQFALEHCFCIKLSIFARAVTLFVSCIN

SEQ ID NO: 116 - protein, 330 aa, Streptococcus pneumoniae
MLIGEGYRTFPVLIYTQFISEVGGNSAFAIMAIIIALAIFLIQKHIANRYSFSMNLLHPIEPKKTTKGKMAAIYATVYGIIFISVLPQIYLIYTSFLKTSGMVFVKGYSPNSYKVAFNRMGSAIFNTIRIPLIALVLVVLFTTFISYLAVRKRNLFTNLIDSLSMVPYIVPGTVLGIAFISSFNTGLFGSGFLMITGTAFILIMSLSVRRLPYTIRSSVASLQQIAPSIEEAAESLGSSRLNTFAKITTPMMLSGIISGAILSWVTMISKLSTSILLYNVKTRTMTVAIYTEVLRGNYGVAAALSTILTVLTVGSLLLFMKISKSNSITL

SEQ ID NO: 117 - protein, 110 aa, Streptococcus pneumoniae
LIIIASMSTPFVGAYSWILLLGRNEVITKFLTNALYLPAIDIYGFKGIILVFTLQLFPLVFLYVAGTMNSIDNSLLEAAESMGSFGFKPIVTVVLPLLVPTLLAAPCLYL

SEQ ID NO: 118 - protein, 101 aa, Streptococcus pneumoniae
LLSTTEFIGLSIRILSNLHESKILVGLLNQFFFWNLLLHKTKSNVVSDSQMWENSVVLENQPDIAFAGFHIIDFCIIEVKFSIFDTVETCNHTKKGRFPTS

SEQ ID NO: 119 - protein, 48 aa, Streptococcus pneumoniae
VTAPTSITPLLVNTHERKSSQSLTSCLVYVVKTVLTSQHLIYSKLKLK

SEQ ID NO: 120 - protein, 138 aa, Streptococcus pneumoniae
MITIKKQEIVKLEDVLHLYQAVGWTNYTHQPEMLEQALSHSLVIYLALDGDAVVGLIRLVGDGFSSVLVQDLIVLPIYQRQGIGSALMKEALEDYKDAYQVQLVTEQTERTLGFYRSMGFEILSTYNCIGMTWMNRKK

SEQ ID NO: 121 - protein, 37 aa, Streptococcus pneumoniae
MGAFVLFLFQLTINRYKKKSFYWYKEVIESNGETLDN

SEQ ID NO: 122 - protein, 123 aa, Streptococcus pneumoniae
VAIDKIAGITSEKDSRAHQIFRISPTCSRCFCNDELVKWVARTIFLQFTKRCCLRSGNITRSNSVTLDIGSTVFRRNVAGQHFQAPFSSSISANCFTSQFAHHRTNIDNLSMPFLYHRRNNCL

SEQ ID NO: 123 - protein, 75 aa, Streptococcus pneumoniae
LFDLLDHGLDTVLVCHVTDISMGFDANFTISFNPFIDQILIDIVKDNSSAGFSVGFGNSKSNSIRSAGDESNFSF

SEQ ID NO: 124 - protein, 111 aa, Streptococcus pneumoniae
MKSLARLLNIHVFISIFLFFALISGAVSHTVLLLLLLFLPALNKGLEKIQSKRIPVLNAALFFLLISFPQLLTNPVQWKFSIFLVVTIISSLAYFYNFYQVVKEVDQKQLI

SEQ ID NO: 125 - protein, 63 aa, Streptococcus pneumoniae
LEAAGEIETEFQGWIVLVVFNHIDSLSRDTDILGEFELGNTQFLAKFFHTIHLVSFLIYVVYI

SEQ ID NO: 126 - protein, 38 aa, Streptococcus pneumoniae
MVDRTDEVSSKHGFEVVDKEKLMWFEEVFEECKKILVS

SEQ ID NO: 127 - protein, 136 aa, Streptococcus pneumoniae
MEGVNHVDIIKVSCGSFISQVNWMMKGKIPNREGFKFSVARLDAIDLVVVHIGHTRCQFSRTGSRSGYDNQVATDFDVVVFAHAFWGNDVIHIRRISFDWIMKIRINSVFLKLVAEGICSGLTSVLCNDNGTNKNP

SEQ ID NO: 128 - protein, 41 aa, Streptococcus pneumoniae
MFNVASINGNHNLNLLFQFLQELDFVVRFITRKDTSSVEIF

SEQ ID NO: 129 - protein, 45 aa, Streptococcus pneumoniae
LFFHFLPLDSIIIKNWKLGNYGAKKEIKKIKQTLAQNFKKCYHIL

SEQ ID NO: 130 - protein, 48 aa, Streptococcus pneumoniae
MQLTSVTAPTGTDNENIQKLLADIKSEYRFDGRPEFVLLGCLQESDCR

SEQ ID NO: 131 - protein, 105 aa, Streptococcus pneumoniae
MIDIHSHIVFDVDDGPKSIEDSKALLREAYNQGVRMIVSTSHRRKGMFETPEEKIVTNFIKVREIAKEVADDLVIAYGAEIYYTLDALEKLEKKKFLPLMIVVML

SEQ ID NO: 132 - protein, 133 aa, Streptococcus pneumoniae
MHTSYREIHTRLSNILMLGITPVIAHIERYDALENNEKRVRELIDMGCYTQIDSYHVSKPKFFGEKYKFMKKRARYFLERDLVHVVASDMHNLDSRPPYMQQAYDIIAKKYRAKKAKELFVDNPRKIIMDQLI

SEQ ID NO: 133 - protein, 230 aa, Streptococcus pneumoniae
MKEQNTLEIDVLQLFRALWKRKLVILLVAIITSSVAFAYSTFVIKPEFTSTTRIYVVNRNQGEKSGLTNQDLQAGSYLVKDYREIILSQDVLEEVISDLKLDLTPKGLANKIKVTVPVDTRIVSVSVNDRVPEEASRIANSLREVAAQKIISITRVSDVATLEEARPAISPSSPNIKRNTLIGFLAGGIGTSVIVLLLELLDTHVKRPEDIEDTLQMTLLGVVPNLGKLK

SEQ ID NO: 134 - protein, 74 aa, Streptococcus pneumoniae
MAKGHHIKLKVKDKIANVLTCNTISINSITSHSNSTQFMPFGMVLTQPLNIRRHPVFSNFNLSSFYILTERTIQ

SEQ ID NO: 135 - protein, 394 aa, Streptococcus pneumoniae
MKIAIAGSGYVGLSLAVLLAQHHEVKVIDVIKDKVESINNRKSPIKDEAIEKYLVEKELNLEASLDPAHVYKDVEYAIIATPTNYDVDLNQFDTSSVEAAIKTCMEYNDTCTIVIKSTIPEGYTKEVREKFNTDRIIFSPEFLRESKALYDNLYPSRIVVGTDLDDSELTKRAWQFADLLKGGAIKEEVPILVVAFNEAEVAKLFSNTYLATRVAYFNEIDTYSEVKGLNPKTIIDIVCYDPRIGSYYNNPSFGYGGYCLPKDTKQLKASFRDVPENLITAVVQSNKTRKDYIAGAILAKQPSVVGIYRLIMKSDSDNFRSSAVKGVMERLDNYGKEIVIYEPTIECDTFMGYRVIKSLDEFKNISDIVVANRMHDDLRDIQEKLYTRDLFGRE

SEQ ID NO: 136 - protein, 417 aa, Streptococcus pneumoniae
MYTFILMLLDFFQNHDFHFFMLFFVFILIRWAVIYFHAVRYKSYSCSVSDEKLFSSVIIPVVDEPLNLFESVLNRISRHKPSEIIVVINGPKNERLVKLCHDFNEKLENNMTPIQCYYTPVPGKRNAIRVGLEHVDSQSDITVLVDSDTVWTPRTLSELLKPFVCDKKIGGVTTRQKILDPERNLVTMFANLLEEIRAEGTMKAMSVTGKVGCLPGRTIAFRTEILRECIHEFMNETFMGFHKEVSDDRSLTNLTLKKGYKTVMQDTSVVYTDAPTSWKKFIRQQLRWAEGSQYNNLKMTPWMIRNAPLMFFIYFTDMILPMLLISFGVNIFLLKILNITTIVYTASWWEIILYVLLGMIFSFGGRNFKAMSRMKWYYVFLIPVFIIVLSIIMCPIRLLGLMRCSDDLGWGTRNLTE

SEQ ID NO: 137 - protein, 44 aa, Streptococcus pneumoniae
LIFEKEKCFLMLRKNLKYQIMTRAGTILAILFFIILGIIVEVLF

SEQ ID NO: 138 - protein, 306 aa, Streptococcus pneumoniae
MKKVKKAVIPAAGLGTRFLPATKALAKEMLPIVDRPTIHFVIEEALRSGIEDILVVTGKSKRSIEDYFDSTFELEYSLRKQGKMELLKSVNESTDIKVHFVRQSSPRGLGDAVLQAKSFVGDDPFVVMLGDDLMDITDSTAVPLTRQLMDDYNATQASTIAVMPVRYEDVSSYGVISPRLESSNGLYSVDAFVEKPKPEEAPSNLAIIGRYLLTPEIFSILETQKPGAGNEIQLTDAIDTLNKTQSVFAREFVGKRYDVGDKFNFMKTSIDYALQHPQIKESLKNYVIALGKQLEKLDDCSSSGHL

SEQ ID NO: 139 - protein, 405 aa, Streptococcus pneumoniae
MNCIESYQKWLNVPDLPAYLKDELLSMDDKTKEDAFYTNLEFGTAGMRGYIGAGTNRINIYVVRQATEGLAKLVESKGETAKKAGVAIAYDSRHFSPEFAFESAQVLAAHGIKSYVFESLRPTPELSFAVRHLGAFAGIMVTASHNPAPFNGYKVYGSDGGQMLPADADALTDYIRAIDNPFAVALADLEEAKSTGLIEVIGETLDSAYLEEVKSVNINQDLIDQYGRDMKIVYTPLHGTGEMLARRALAQAGFESVQVVEAQAKPAPDFSTVASPNPESQAAFALAEELGRQVDADVLVATDPDADRLGVEIRQADGSYWNLSGNQIGALIAKYILEAHKQAGTLPKNAALAKSIVSTELVTKIAESYGATMFNVLTGFKFIAEKIQEFEEKHNHTYMFGFEEG

SEQ ID NO: 140 - protein, 1767 aa, Streptococcus pneumoniae
MNKGLFEKRCKYSIRKFSLGVASVMIGAAFFGTSPVLADSVQSGSTANLPADLATALATAKENDGRDFEAPKVGEDQGSPEVTDGPKTEEELLALEKEKPAEEKPKEDKPAAAKPETPKTVTPEWQTVEKKEQQGTVTIREEKGVRYNQLSSTAQNDNAGKPALFEKKGLTVDANGNATVDLTFKEDSEKGKSRFGVFLKFKDTNNNVFVGYDKDGWFWEYKSPTTSTWYRGSRVAAPETGSTNRLSITLKSDGQLNASNNDVNLFDTVTLPAAVNDHLKNEKKILLKAGSYDDERTVVSVKTDNQERVKTEDTPAQKETGPVVDDSKVTYDTIQSKVLKAVIDQAFPRVKEYTLNGHTLPGQVQQFNQVFINNHRITPEVTYKKINETTAEYLMKLRDDAHLINAEMTVRLQVVDNQLHFDVTKIVNHNQVTPGQKIDDERKLLSSISFLGNALVSVSSDQTGAKFDGATMSNNTHVSGDDHIDVTNPMKDLAKGYMYGFVSTDKLAAGVWSNSQNSYGGGSNDWTRLTAYKETVGNANYVGIHSSEWQWEKAYKGIVFPEYTKELPSAKVVITEDANADKKVDWQDGAIAYRSIMNNPQGWEKVKDITAYRIAMNFGSQAQNPFLMTLDGIKKINLHTDGLGQGVLLKGYGSEGHDSGHLNYADIGKRIGGVEDFKTLIEKAKKYGAHLGIHVNASETYPESKYFNEKILRKNPDGSYSYGWNWLDQGINIDAAYDLAHGRLARWEDLKKKLGDGLDFIYVDVWGNGQSGDNGAWATHVLAKEINKQGWRFAIEWGHGGEYDSTFHHWAADLTYGGYTNKGINSAITRFIRNHQKDAWVGDYRSYGGAANYPLLGGYSMKDFEGWQGRSDYNGYVTNLFAHDVMTKYFQHFTVSKWENGTPVTMTDNGSTYKWTPEMRVELVDADNNKVVVTRKSNDVNSPQYRERTVTLNGRVIQDGSAYLTPWNWDANGKKLSTEKEKMYYFNTQAGATTWTLPSDWAKSKVYLYKLTDQGKTEEQELTVKDGKITLDLLANQPYVLYRSKQTNPEMSWSEGMHIYDQGFNSGTLKHWTISGDASKAEIVKSQGANDMLRIQGNKEKVSLTQKLTGLKPNTKYAVYVGVDNRSNAKASITVNTGEKEVTTYTNKSLALNYVKAYAHNTRRDNATVNDTSYFQNMYAFFTTGSDVSNVTLTLSREAGDQATYFDEIRTFENNSSMYGDKHDTGKGTFKQDFENVAQGIFPFVVGGVEGVEDNRTHLSEKHYPYTQRGWNGKKVDDVIEGNWSLKTNGLVSRRNLVYQTIPQNFRFEAGKTYRVTFEYEVGSDNTYAFVVGKGEFQSGRRGTQASNLEMHELPNTWTDSKKAKKATFLVTGAETGDTWVGIYSTGNASNTRGDSGGNANFRGYNDFMMDNLQIEEITLTGKILTENALKNYLPTVAMTNYTKESMDALKEAVFNLSQADDDISVEEARAEIAKIEALKNALVQKKTSLVADDFASLTAPAQAQEGLANAFDGNLSSLWHTSWGGGDVGKPATMVLKEPTEITGLRYVPRGSGSNGNLRDVKLVVTDESGKEHTFTTTDWPDNNKSKDIDFGKTIKAKKIVLTGTKTYGDGGDKYQSAAELIFTRPQVAETPLDLSGYEAALAKAQKLTDKDNQEEVASVQASMKYATDNHLLTERMVEYFADYLNQLKDSATKPDAPTVEKPEFKLSSLASDQGKTPDYKQEIDRPETPEQILPATGESQSDTALFLAGVSLALSALFVVKTKKD

SEQ ID NO: 141 - protein, 68 aa, Streptococcus pneumoniae
LQIAQESSQDTDGINPPVVEEAMVFDRNDCLNQICGNIISLGIDAAFRTQVSNELIFIVVDFTRSCCN

SEQ ID NO: 142 - protein, 38 aa, Streptococcus pneumoniae
MLNLMWMKIFHRNRTFLFCFLDFKVDVISIINARIVRR

SEQ ID NO: 143 - protein, 41 aa, Streptococcus pneumoniae
MYNSQALRQIVVVGSIDHLFKRHSSICEIFGLRKRCLSFLW

SEQ ID NO: 144 - protein, 373 aa, Streptococcus pneumoniae
MKLLKKTMQAGLTVIFFGLLATNTVFADNSEGWQFVQENGRTYYKKGDLKETYWRVIDGKYYYFDSLSGEMVVGWQYIPFPSKGSTIGPYPNGMRLEGFPNSEWYYFDKNGVLQEFVGWKTLEIKTKDSVGRKYGEKREDSEDKEEKRYYTNYYFNQNHSLETGWLYDQSNWYYLAKTEINGENYLGGERRAGWINDDLTWYYLDPTTGIMQTGWQYLGNKWYYLRSSGAMATGWYQEGTTWYYLDQPNGDMKTGWQNLGNKWYYLRSSGAMATGWYQEGTTWYYLDQPNGDMKTGWQNLGNKWYYLRSSGAMATGWYQDGSTWYYLNAGNGDMKTGWFQVNGNWYYAYSSGALAVNTTVDGYSVNYNGEWVR

SEQ ID NO: 145 - protein, 40 aa, Streptococcus pneumoniae
MTTGWFQVNGRWYYAYSSGALAVNTTVDGYFVNYNGEWVQ

SEQ ID NO: 146 - protein, 80 aa, Streptococcus pneumoniae
MSLADLLEELEAAKDSKKARSMEAYMRHQFSFLGIAVPERNKLYKNIFQKRKKQRLSIGILQTLAGKRILENTNMWLLTI

SEQ ID NO: 147 - protein, 58 aa, Streptococcus pneumoniae
MEKILLHNLNQTEFFINKAIGWTLRDYSKTNPTWVTCFIEKNKERMAELSIKEASKYL

SEQ ID NO: 148 - protein, 112 aa, Streptococcus pneumoniae
VLEILKEYLLLEEGDYIFTNNGSPLMITCFNYFLKNSFRKSEIKKDDFVLTAHVFRYSHISLLAELEVPITAIMDRVDYTNETKILSVYTHVTEKMKSNITEKLDKLVLEND

SEQ ID NO: 149 - protein, 54 aa, Streptococcus pneumoniae
  misc_feature 46...48: Xaa is any amino acid
LVIFKNCSHCTSNCKSRTVQGMKEFHLAICFITVTDLSTTGLEIFXXXFHSLIN

SEQ ID NO: 150 - protein, 81 aa, Streptococcus pneumoniae
  misc_feature 3...4: Xaa is any amino acid
MNXXARGFSFVCKDFEVAAHFASSDIGSNLIDMAPRNLDKLFDIDIWVKFQSLISDKEFPNFPSDREVGSACRTEEYCFVK

SEQ ID NO: 151 - protein, 41 aa, Streptococcus pneumoniae
  misc_feature 35...36: Xaa is any amino acid
LQKPLFQILQKLVKISQAFIHDSNFFLAHAINNFXXHSFIN

SEQ ID NO: 152 - protein, 44 aa, Streptococcus pneumoniae
VGFSLLLLLIFCLFCLLFNVSNQVTNCFQVIFCFDLDIKSIFDF

SEQ ID NO: 153 - protein, 57 aa, Streptococcus pneumoniae
VNIDSSEFYISHITDGIFDSFLDSNRYLRNFYSVLKVEIDICCEFFVHVFKINATAE

SEQ ID NO: 154 - protein, 37 aa, Streptococcus pneumoniae
VNTLYLCSSNSNDFFKYTWGDNDFAKLFFNSHRMTSF

SEQ ID NO: 155 - protein, 37 aa, Streptococcus pneumoniae
LFSPRPGGDNGKGTTFLNFFLNIHKFSFFDSLFFLFQ

SEQ ID NO: 156 - protein, 65 aa, Streptococcus pneumoniae
VKEEKKAIVLGADNAYMDKVETTLKSLCVHHYNLKFYVFNDDLPREWFQLMEKRLETLNSEIVNV

SEQ ID NO: 157 - protein, 62 aa, Streptococcus pneumoniae
LAQISILHFDFLSIDKHSHTVFNTLRKSLQTTLALSATSKQCFEQLAASFLVCSLIFIEYKV

SEQ ID NO: 158 - protein, 350 aa, Streptococcus pneumoniae
MSLITHRRFISSKVTRQKFVDNQIDLKYYIWRYSHALCGIDVAKNKHDVTALNVSGKTVLKPLTFSNNKAGFELLDLSLRQLNQDYLIALEDTGHYAFNLLNFLHEQGYKVYTYNPLLIKKFAKSLLLRKTKTDKKDAHGIALKLLSDPNREQFQHDNRQVELKILARHIHRLKKKQSDWKVQYTRCLDIIFPELDKIVGKHSEYTYQLLTCYPNPQKRLEAGFDKLIEIKRLTASKIQDILSVAPRSIGTTSPAREFEIIENIKHYKRLIDKAETCVNDLMAEFNSVITTVTGIGNRLGAVILAEIQNIHAFDNPAQLQAFAGLDSSIYQSGQIDLAGRMVKRGSPHLR

SEQ ID NO: 159 - protein, 56 aa, Streptococcus pneumoniae
MDTKSSCLITTGRNDSPSTCLPRVASNNDRFSSEFRIIPDFHCSKKGIHVNMDDFS

SEQ ID NO: 160 - protein, 185 aa, Streptococcus pneumoniae
MDKMKPVFQALNKELIQENLTLTIICVGGYVLEYHGLRATQDVDAFYDQNQKINEIIARVGKQFNLNTHEELWLNNHVANMNKQPPLSLCESLYSFENLTVLVVPIEYVLGMKMMSIREQDLKDIGAIIKYKNFHSPFDTFKYLKDMGFDTIDLSVLLEGFSYAYGMDWLEKFFKENQDKLREFY

SEQ ID NO: 161 - protein, 102 aa, Streptococcus pneumoniae
MIPLYRTDNDITKFFTKIRNGHLAKTAGGLDDKFHEANASTSKAFDRQGVGEVNDIRDSAGSQELRINDKRKTENILFLEIRVRIFRVPHPNDSFFSSHFLG

SEQ ID NO: 162 - protein, 83 aa, Streptococcus pneumoniae
VLSQGDKDITILDAGLLKNGKIGPVTKDTNDIKATDNMIENSFVLLNQQNIMLFCNQGATEGKTNFSPSDKDNFHNKTYFFMM

SEQ ID NO: 163 - protein, 100 aa, Streptococcus pneumoniae
MKIKEQTRKLAAGCSKQCFEIVDRTDEVSSKHGFEVVDETDEVSSKHGFEIVDETDEVSNHTYGKAKLTWFEEIFEEYKMMGKAGQLVFFDVYRLVRQVS

SEQ ID NO: 164 - protein, 49 aa, Streptococcus pneumoniae
MEKFNFKNNIGQENKLLQIEIYKFTNFCKLQNYTSVNIFSKDIFEAIVN

SEQ ID NO: 165 - protein, 424 aa, Streptococcus pneumoniae
VRIKSIYWNFGQNKPEKSFRYIDTSSIDRKKNIINYKNLQYLSPEQAPSRARKLVSQNSVLFSTVRPYLKNIAVVRELKEYLIASTAFIVLDTLLNETYLKYYLLSDNFINRVNNKSTGTSYPAINDYNFNLLLIPLPPLSEQQRIVEAIESALEKVDEYAESYNRLEQLDKEFPDKLKKSILQYAMQGKLVEQDPNDESVEVLLEKIRAEKQKLFEEGKIKKKDLDISIVSQGDDNSYYGNIPMNWVVIKIKDIFSINTGLSYKKGDLSINKGVRIIRGGNIKPLEFSLLDNDYYIDTQFISSEQVYLKHNQLITPVSTSLEHIGKFARIDKDYDGVVAGGFIFQLTPFESSEIISKFLLFNLSSPLFYKQLKAITKLSGQALYNIPKTTLSELLIPLAPFEEQELITQKVEKLFEKVNQLWK

SEQ ID NO: 166 - protein, 51 aa, Streptococcus pneumoniae
MIRKVNHNIFKHRSVVIFTLTNSYFCKFFINDISISFHSHQHFCWIIIQIK

SEQ ID NO: 167 - protein, 40 aa, Streptococcus pneumoniae
LDNIHIVLDSLNAVSGIQDFICDGLAIFCNQITSGCSSCK

SEQ ID NO: 168 - protein, 446 aa, Streptococcus pneumoniae
MNIAWILLYALVINGLEIVIFFKVDGIGLTFDRIFKAFLLKFLLGIIFTTFQFLAVSKYLSYFIEPLFGIGLSFLLLRGLPKKILIFYGLFPMILVELFYRGVSYFVLPFLGQGIVDGDGNPIFLLIMIFVCFIVLVFLKWLDYDFTRLRREFLDTGFQKSLTKINWAMGAYYLVMQSLSYLEYEQGIQSTTVRHLILVFYLLFFMGGIKKLDTYLKEKLQEELNQEQTLRYRDMERYSRHIEELYKEIRSFRHDYTNLLTSLRLGIEEEDMEQIKEIYDSVLRDSSQKLQDNKYDLGRLVNIRDRALKSLLAGKFIKAREKNIVFNVEVPEEIQVEGMSLLDFLTIVSILCDNAIEASAEASQPHVSIAFLKNGAQETFIIENSIKEEGIDISEIFSFGASSKGEERGVGLYTVMKIVESHPNTNLNTTCQNQVFRQVLTVIHAE

SEQ ID NO: 169 - protein, 133 aa, Streptococcus pneumoniae
MISQEDILKACEVAEIRQDIERMPMGYQTQLSDGAGLSGGQKQRIALARALLTKSPVLILDEATSGLDVLTEKKVIDNLMSLTDKTILFVAHRLSIAERTNRVIVLDQGKIIEVGIHQELMQAQGFYHHLFNK

SEQ ID NO: 170 - protein, 146 aa, Streptococcus pneumoniae
MSSKISIGQLITFNTLLSYFTTPMENIINLQTKLQSAKVANNRLNEVYLVESEFQVQENPVHSHFLMGDIEFDDLSYKYGFGRDTLTDINLTIKQGDKVSLVGVSGSGKTTLAKMIVNFFEPYKGHISINHQDIKNIDKKSLAPSY

SEQ ID NO: 171 - protein, 217 aa, Streptococcus pneumoniae
MKSTLGIISVGLVITYILQQVMSFSRDYLLTVLSQRLSIDVILSYIRHIFELPMSFFATRRTGEIISRFTDANSIIDALASTILSLFLDVSILILVEGVLLAQNPNLFLLSLISIPIYMFIIFSFMKPFEKMNHDVMQSNSMVSSAIIEDINGIETIKSLTSEENRYQNIDSEFVDYLEKSFKLSKYSILQTSLKQGNKISSEYPYPMVWRSISHVE

SEQ ID NO: 172 - protein, 195 aa, Streptococcus pneumoniae
MTSYKRTFVPQIDARDCGVAALASIAKFYGSDFSLAHLRELAKTNKEGTTALGIVKAADEMGFETRPVQADKTLFDMSDVPYPFIVHVNKEGKLQHYYVVYQTKKDYLIIGDPDPSVKITKMSKERFFYEWTGVAIFLATKPSYQPHKDKKNGLLSKLPSSDFQTKISHCLHCSLKLIGHYYQYRWFLLSPRNLG

SEQ ID NO: 173 - protein, 60 aa, Streptococcus pneumoniae
MGLIKTLAKIYGNYFLTVQGVKVMKTIKKDDHVVVGLGKLFIADKLMDTARWLIKPEDKK

SEQ ID NO: 174 - protein, 50 aa, Streptococcus pneumoniae
MKFFWGLLAIIFIKPIIGIVKFFWMIISFAVQLLFYKIVFKILDWLFKLI

SEQ ID NO: 175 - protein, 55 aa, Streptococcus pneumoniae
MHSQTFQFLLMTDKTSLLHRKHRSFIRNIHSKFLILFDLLCGILSRNDSNHNPIS

SEQ ID NO: 176 - protein, 185 aa, Streptococcus pneumoniae
MARTELPDKIETERLVLRVRTVADAEDIFDYASLPEIAYPAGFPPVKTLEDEIYYLEHILPERNQKENLPAGYGIVVKGTDKIVGSVDFNHRHEDDVLEIGYTLHPDYWGRGYVPEAARALIDLAFKDLGLHKIELTCFGYNLQSKRVAEKLGFTLETRIRDRKDVQGNRCDSLIYGLLKSEWEE

SEQ ID NO: 177 - protein, 320 aa, Streptococcus pneumoniae
MSDVKEEVSSLSEKQLRQIDVEYAELNDSDIIERLAYLEINNNEKRIVISDIEPTKEIMSVSDQIFEIQKNFQKIKNMFELFISDVSDFLSIKNKLESKELEIEEADVNRFMIHLLSSGKLFVDFNENQIKQKYSKDSEEFDCIHGFASYQYDINFTYRFCHSLRNYSQHTDLPINEVKAVSPDDETVIIDFYIDLDYLLNSNFKWKKLKGELIKLNQETSKIDAIALVKEYFNALTELYGNYNKLFLKLNHNTLVDIKSKLESLKLKHSRYYISKISKYDLKYNPGNYTMSPLAAFAEIEEIYIELSKIGLVKIVNKSN

SEQ ID NO: 178 - protein, 251 aa, Streptococcus pneumoniae
MSKHPHYELLNLIGYGLAKFDKLFIKEFQCSSKSEFYRYVVSLGIAETTGVVKNRMDLFDPYFDNNRKGWWQKAEVYRFRKDLIDMMFGNEDVHSYAEIVKMLLASEGKKTGITIVEKPIVRTKFKRLQETGMEAENYFILHFDKEEKFQGGQLTDARLYGDGYDFQVDVQEYSYLAEVKGIRKSKGRVRLTAKEFEKVKEFQSDFILSLVTNLDDIPKLVLIDNPLKHFEFKKNIIKNEIIEYRSVEDLY

SEQ ID NO: 179 - protein, 46 aa, Streptococcus pneumoniae
LSTCWNGKFCHICVALFHCFRAFKLALNEILCLLTNVSFIFVSVAF

SEQ ID NO: 180 - protein, 40 aa, Streptococcus pneumoniae
LLRKQEREYLRAENAILKKLRELRLKEEKEKEERQKLFKN

SEQ ID NO: 181 - protein, 37 aa, Streptococcus pneumoniae
LKHLFCHFNPLWIDEIIRLAYKDQDTKDVKSKVKIGN

SEQ ID NO: 182 - protein, 50 aa, Streptococcus pneumoniae
MKEIAFDAFYQLYQNDQLSLVDVREVDEFAALHLEGAHNLPLSQLADSYD

SEQ ID NO: 183 - protein, 40 aa, Streptococcus pneumoniae
MVSNHKIACFQLFDKVGIFSLLDELNSLANKAHINLLNCF

SEQ ID NO: 184 - protein, 41 aa, Streptococcus pneumoniae
MDFFFMNEVKEQVLFRDNHSEHIFWIEGVSDFMIKVNTALW

SEQ ID NO: 185 - protein, 45 aa, Streptococcus pneumoniae
MKIKEQTRKLAAGCSKHCFEVVDRTDEVSNHTHGKATLTWFEEIF

SEQ ID NO: 186 - protein, 78 aa, Streptococcus pneumoniae
MKIKEQTRKLAAGCSKHSFEVVDKTDEVSSKHGFEVVDETDEVSSKHGFEVVDETDEVSNHIYGKATLTKFELDFRRV

SEQ ID NO: 187 - protein, 207 aa, Streptococcus pneumoniae
MEELVTLDCLFIDGTKIEANANKYSFVWKKTTEKFSAKLQEQIQVYFQEEITPLLIKYAMFDKKQKRGYKQSAKNLANWHYNDKEDSYIHPDGWCYRFHHIKYQKTQTDFQQEIKVYYADEPESAPQKGLYMNERYQNLKAKECQALLSPQDRQIFAQRKIDVEPVFGQIKACLGYKRCNLRGKRQVRIDMGLVLMANNLLKHSEMK

SEQ ID NO: 188 - protein, 81 aa, Streptococcus pneumoniae
MHIHYNTNQTTLPLEISSFLPQDHLVFTIEKVVNTLEDCHFHAFYHAFDRPSYHLKMLVSTLLFAYSQGIFSGRKIEKWKS

SEQ ID NO: 189 - protein, 148 aa, Streptococcus pneumoniae
VETVKRLRKYPKIEIVSHLINGLPGETHEMMVENVRRCVTDNDIQGIKLHLLHLMTNTRMQRDYHEGRLQLMSQDEYVRVICDQLEIIPKHIVIHRITGDAPRDMLIGPMWSLKKWEVLNSIEMEMRRRGSVQGCKAVKQEFENEKTT

SEQ ID NO: 190 - protein, 37 aa, Streptococcus pneumoniae
VQVCVFTNFCFFHCFSSLANCRLFNLRGICLPCISYQ

SEQ ID NO: 191 - protein, 1811 aa, Streptococcus pneumoniae
VFKKDRFSIRKIKGVVGSVFLGSLLMAPSVVDAATYHYVNKEIISQEAKDLIQTGKPDRNEVVYGLVYQKDQLPQTGTEASVLTAFGLLTVGSLLLIYKRKKIASVFLVGAMGLVVLPSAGAVDPVATLALASREGVVEMDGYRYVGYLSGDILKTLGLDTVLEETSAKPGEVTVVEVETPQSTTNQEQARTENQVVETEEAPKEEAPKTEESPKEEPKSEVKPTDDTLPKVEEGKEDSAEPSPVEEVGGEVESKPEEKVAVKPESQPSDKPAEESKVEPPVEQAKVPEQPVQPTQAEQPSTPKESSQQENPKEDRGAEETPKQEDEQPAEAPEIKVEEPVESKEETVNQPVEQPKVETPAVEKQTEPTEEPKVEVTSIPQTTRYEEDLTKEHGTREVVKEGKNGSRTVTTPYILNATDGTTTEGTSTTDEAEMEKEVVRVGTKPKEKLAPVLSLTSVTDNAMLRSARLTYHLENTDSVDVKKIHAEIKNGDKVVKTIDLSKERLSDAVDGLELYKDYKIVTSMTYDRGNGEETSTLEETPLRLDLKKVELKNIGSTNLVKVNEDGTEVASDFLTSKPVDVQNYYLKVTSRDNKVFRLTVEKIEEVTEEGQPLYKVTAKAPNLIQHTDATKMQDEYVYYIEKTRATDGDIYYNFNDLVNAMNKNKTGTFKLGADLNATGVPTPAKSYVTGDFRGTLTSVDGEHYTIHNTSRPLFNNIIGGTIKDINLGNVNIHMPWANNVASLANIIKGGTTIENVKVTGNVLGKDWVSGFIDKIDSGGTLRNVAFIGNVTSVGTGGSFLTGIVGENWKGLVEQAYVDANIRGKKAKAAGIAYWSQNGGDNYAVGRYGAIKKSVVKGSIDVEKPIEVGGAVGSLNYLGYIEDTVAMMKVKNGEIFYGSHDIDTDPYYTGERVNRNFIVDGVSEGKSSYKYSKQQNRIKSVSQEEADKKIKELAITADKYAITEPIVNKLNALTTRDNEYRTTQDYKADRELAYRNIEKLQPFYNKEWIVDQGNKVPSNSKLLTTEVLSVTGMKDGQFVTDLSEIDKIMIHYADGTKEEMNVTAVADSKVKQVREYDVTDLGVVYTPNMVDKNRDQLIADVKAKLSSVELISPEVRALMDKRGKAEENTEGRQNGYIRDLFLEESFAEVKAGLGKLVKALVENEDYQLNSDEAAMRALIKKVEDNKAKIMMGLAYLNQYYSFKYAELSIKDIMMFKPDFYGKNVNVLDFLIKIGSSERNVKGDRTLEAYRETIGGTIGINELNGFLHYNMKLFTNHIDINDWFKKAIEKNAYVVEQPSTNPAFANKKYRLYEGINNGQHGRMILPLLNLKNAHLFMISTYNTISFSSFEKYGKDTDEKREKFKSEINKRAKEQVNYLDFWSRLATDNVRDKLLKSQNVVPTPVWDNHNSPNGWASRHGHIDGKPDYAPIREFFGRINKYHGYKYGYGAYAYIFAAPQPMDAVYFVMTDLISDFGTSAFTHETTHINDRMAYYGGHWHREGTDLEAFAQGMLQTPSVSNPNGEYGALGLNMAYERQNDGNQWYNPNPNKLKSRAEIDHYMKNYNEALMMLDYLEAESVLPKLKGNNDRWFKKMDKQMRKDGQPHQFDKIRDLNNEEKKIQLASIEDLVDNNFMTKHGAPGNGTYNPSDFSSAYVNMNMMTGVYGGNSSDGAPGAASFKHNTFRMWGYFGYENGFIGYASNKYKAEANKAGQTLSDKYIINKVSGGTFNTLEAWKKEWFKQIKTKAQKGFTAIEIDGKTIDSYEKLKDLFDKAVEEDLKGTGTDKTVKLKEKVYKQLLKNTDGFSGDLFTAPQA

SEQ ID NO: 192 - protein, 82 aa, Streptococcus pneumoniae
VGDRIFIAFLQKLGLLDNLTGIREKLHPITGQGDSLGIADKDLNAHFIFQISHCIGETWLSDKELLGCLIHGASFDDFDNIM

SEQ ID NO: 193 - protein, 38 aa, Streptococcus pneumoniae
VSRWDGHSDKGEAPAGKTSYAWIWTKWGEQVAFYCDYD

SEQ ID NO: 194 - protein, 288 aa, Streptococcus pneumoniae
MKLFKPLLTVLALAFALIFITACSSGGNAGPSSGKTTAKARTIDENKKSGELRIAVFGDKKPFGYVDNDGSYQGYDIELGNQLAQDLGVKVKYISVDAANRAEYLISNKVDITLANFTVTDERKKQVDFALPYMKVSLGVVSPKTGLITDVKQLEGKTLIVTKGTTAETYFEKNHPEIKLQKYDQYSDSYQALLDGRGDAFSTDNTEVLAWALENKGFEVGITSLGDPDTIAAAVQKGNQELLDFINKDIEKLGKENFFHKAYEKTLHPTYGDAAKADDLVVEGGKVD

SEQ ID NO: 195 - protein, 98 aa, Streptococcus pneumoniae
MDTPDENGYVADDYRITYLEAHIKAMRDAIYQDGVDLLGYTTWGCIDPVSAGTGEMNKRYGFIYVDRDNVGNGALKRSKKKSFYWYKDVIDSNGASIG

SEQ ID NO: 196 - protein, 325 aa, Streptococcus pneumoniae
MTEPDFWNDNIAAQKTSQELNELKNTYNTFHKMEELQDEVEILLDFLAEDESVHDELVAQLAELDKIMTSYEMTLLLSEPYDHNNAILEIHPGSGGTEAQDWGDMLLRMYTRYGNAKGFKVEVLDYQAGDEAGIKSVTLSFEGPNAYGLLKSEMGVHRLVRISPFDSAKRRHTSFTSVEVMPELDDTIEVEIREDDIKMDTFRSGGAGGQNVNKVSTGVRLTHIPTGIVVQSTVDRTQYGNRDRAMKMLQAKLYQMEQEKKAAEVDSLKGEKKEITWGSQIRSYVFTPYTMVKDHRTSFEVAQVDKVMDGDLDGFIDAYLKWRIS

SEQ ID NO: 197 - protein, 112 aa, Streptococcus pneumoniae
MQVIKRNGEIAEFNPDKIYQAILKAAQTVYVLTDDLRQNLAQVTKKVVLDLQEAKVERATISMIQSMVEHRLLGAGYITIAEHYISYRLQRDLERSGYGDHIAVHLHFEQIR

SEQ ID NO: 198 - protein, 242 aa, Streptococcus pneumoniae
MELFKTWKKNMVLYGLKSQIGTVYRNNDRTTSFYDVGNFLYLAGELDSRFWEDFVRKYGLDYKIIISENTNWQDFLHRKVGLNSFTRYSFKDKANFQVEFLNNLVTHLEEGYNIVPIDNHIYNCFSTEEWSQDLQGDFESYQDFVLKGGFGFVILKNNELIAGISSGLVYRKAVEVEVATRPNEQGNGFAKKLGAAMILESLNRDMFPLWDAHNEASKKVAEFLGYELSEPYEAFELEEILI

SEQ ID NO: 199 - protein, 38 aa, Streptococcus pneumoniae
LGSDRKALHKPVYLFWCESFDILFCTWSSQFSVLKAFI

SEQ ID NO: 200 - protein, 290 aa, Streptococcus pneumoniae
MKVINQTLLEKVIIERSRSSHKGDYGRLLLLGGTYPYGGAIIMAALAAVKSGAGLVTVGTDRENIPALHSHLPEPMAFSLQDQQLLKEQLEKAEVILLGPGLRDDASGENLVKQVFVNLSQNQILIVDGGALTILARTSLSFPSSQLILTPHQKEWEKLSGITIEKQKEDATASVLTSFPQGTILVEKGPATRIWEVGQSDYYQLQVGGPYQATGGMGDTLAGMIAGFVGQFRQASLYERVAVATHLHSAIAQELSQENYVVLPTEISRYLPKIMKIICQQDRVSKDKLV

SEQ ID NO: 201 - protein, 60 aa, Streptococcus pneumoniae
  misc_feature 56...57: Xaa is any amino acid
VLASNRKFIFFFFRIGILILKNIKSFNQFLALFHKIPSHDGSRKSLSWSDGKSLKXXFIH

SEQ ID NO: 202 - protein, 347 aa, Streptococcus pneumoniae
VLDSKEELKESENDAPKLETPLREEPRLAPQTLLEASEVLENKREESKVGITEPAQDSPILAPVEETKEEAVTEKPTNTRSLTAEDLVKISKGELHLENDLIDESFYGEKALDLEGDDYQDGIKNKDGKDYLGYNSHPLLADSDGDGLADGEDDNKKEWYVTDRDSLLFMELAYRDDDYIEKILDHKNLFPSLYLDRQEHKLMHNELAPFWKMKKAYYTDSGLDAFLFETKSDLPYLKDGTVHMLAIRGTRVNDAKDLSADFVLLGGNKLAQADDIRKVVGELAKDISITKLYMTGHSLGGYLAQIAAVEDYQKYPDFYNHVLRKVTTFSAPKVITSRTVWDAKNGF

SEQ ID NO: 203 - protein, 55 aa, Streptococcus pneumoniae
MGRNPKTRPEERTELERLQSENEYLRAENAILKKLRELRLKEEKEKEERQKLFKN

SEQ ID NO: 204 - protein, 46 aa, Streptococcus pneumoniae; identical to SEQ ID NO: 179

SEQ ID NO: 205 - protein, 234 aa, Streptococcus pneumoniae
VVLSTSAILVACGKTDKEADAPTTFSYVYAVDPASLGYSIATRTSRTDVIGNVIDGLMENDKYGNVAPSQKDYDLNSTGWAPSYQDPASYLNIMDPKSGSAMKHLGITKGKDKDVVAKPGLDKYKKLLEDAVSETTDLEKRYEKYAKAQAWSTDSSLLMPTASSGGSPVVSNVVPFSKPYSQVGIKGEPYIFKGMKLQKDIVTTKEYNEVFKKWQKEKLESNSKYQKELEKYIK

SEQ ID NO: 206 - protein, 37 aa, Streptococcus pneumoniae
LNFDFFIFLAHFIPLFTFSILQENPKTSKKKLYIRLL

SEQ ID NO: 207 - protein, 37 aa, Streptococcus pneumoniae
MGFSMKLIHDLDTHTTHSTAKMLYNVKAIKNDFSIRE

SEQ ID NO: 208 - protein, 75 aa, Streptococcus pneumoniae
LIRIIRNIYRSGEGNTSVFQSFIDQINSNQFCYGSNFDRLRCILLIENFTSICLNSNRMFSGNGKILSNSSRSTP

SEQ ID NO: 209 - protein, 103 aa, Streptococcus pneumoniae
MIYFDNSATTKPYPEALETYMQVASKILGNPSSLHRLGDQATRILDASRHQIADLIGKKTDEIFLTSGGTEGDNRVLQGVAFEKAQFGKHIIVSPLPHSAVLE

SEQ ID NO: 210 - protein, 66 aa, Streptococcus pneumoniae
MKIKEQTRKLAAGCSKHCFEVVDKTDEVSSKHGFEVVDETDEVSNHTYGKATLTRIEEIFEEYKSS

SEQ ID NO: 211 - protein, 42 aa, Streptococcus pneumoniae
LVYAPFSFNILLDYITFDFKILLFSVFLAINRFHNDFIQFLL

SEQ ID NO: 212 - protein, 42 aa, Streptococcus pneumoniae
MSGYSGLSFFEVALAEFLDIVSAVYLEDADGIIVNLWGILDK

SEQ ID NO: 213 - protein, 85 aa, Streptococcus pneumoniae
MEGVAKGRIGRKKNNGIDNRCCHKKRNGRVTWNLFFQKTIDDGDDSTFTRREKHTDEGPKKDSPPTISREKMINLVRCDINFNQP

SEQ ID NO: 214 - protein, 76 aa, Streptococcus pneumoniae
VDKTDEVSSKHCFEVVDKTDEVSSKHCFEVVDKTDEVSSKHCFEVVDRTDEVSSKHCFEVVDRTDEVSNRTTVRRS

SEQ ID NO: 215 - protein, 50 aa, Streptococcus pneumoniae
MDYGLYHPCPIVTPSQSSSIVANPASKLISASEELIPDAIAVDFVEVNCY

SEQ ID NO: 216 - protein, 37 aa, Streptococcus pneumoniae
MKKLFQEKFSKKPSHKEIERVQLGCAMMQATFHLMGY

SEQ ID NO: 217 - protein, 196 aa, Streptococcus pneumoniae
VVIGVASATTNIWIIFLSGFAAILAGAFSMAGGEYVSVSTPKDTEEAAVSREKLLLDQDRGLAKKSLYAAYIQNGECKTSAQLLTNKIFLKNPLKALVEEKYGIEYEEFTNPWHAAISSFVAFFLRSLPPMLSVTIFPSEYRIPATVLIVGVALLLTGYTSARLGKDPTRTAMIRNLAIGLLTMGVTFLLEQLFSI

SEQ ID NO: 218 - protein, 40 aa, Streptococcus pneumoniae
MLYVGIDVAKNKHDVTALNVPGKLFLNHSLFQIIKLVLNS

SEQ ID NO: 219 - protein, 215 aa, Streptococcus pneumoniae
MDFEYFYNREAERFNFLKVPEILVDREEFRGLSAEAIILYSILLKQTGMSFKNNWIDKEGRVFIYFTVEEIMKRRNISKPTAIKTLDELDVKKGIGLIERVRLGLGKPNIIYVKDFMSIFQVKENDLQKSKNLTSEVKDFNLRSKENELQEVKNLDSNYIENNKSKYSKREYSFGENGLGTFQNVFLAAEDISDLQIIMNSQLENYIRLPAKLES

SEQ ID NO: 220 - protein, 75 aa, Streptococcus pneumoniae
LLHIRVCKTFDRIPYCMLALFLSKSIGLTILLHKVKTVIFIDDQSNDKTCKICIHISFFRIKLSQQCQLSFSVYF

SEQ ID NO: 221 - protein, 59 aa, Streptococcus pneumoniae
MTQEDALIVISHIKVLSIVPNRCLKPLDKTFSLYNWIFLSQKYILLQANFLKISRVQLQ

SEQ ID NO: 222 - protein, 91 aa, Streptococcus pneumoniae
VTTHDEPVYEKHGVLHYAVANIPGAVARTSTIALTNVTLPYIEALAGKGFAQAISEDEGLRQGVTTYQGYLTSLPVAQGLNRDYTDINDLV

SEQ ID NO: 223 - protein, 76 aa, Streptococcus pneumoniae
VFFIDGFIVRCHTVSCFDNATLVNSNVNDTEPGRICLTISSVTNSGAFAPGMRMAPITTSASLILASMLNELDIRV

SEQ ID NO: 224 - protein, 141 aa, Streptococcus pneumoniae
MLIGIPKEIKNNENRVALTPAGVHSLVSRGHRVLIETNAGLGSGFTDADYQKQGAEIVATAGEAWAAELVVKVKEPLSSEYGYLRDDLLLFTYLHMAAAPELADAMLAAKTTGIAYETVRDNQGQLPLLVPMSEVAGRMAV

SEQ ID NO: 225 - protein, 41 aa, Streptococcus pneumoniae
LIRILGNSFISIDKAHEQAEEYGHSFEREMGFLAVHGLFTY

SEQ ID NO: 226 - protein, 58 aa, Streptococcus pneumoniae
VILFFIRFRVSWLTYFIMSLIFIRFTILVCLIFTNMVASVTKAIILMADVRLDVRHST

SEQ ID NO: 227 - protein, 46 aa, Streptococcus pneumoniae
MIAMRSYITLICNLNNNLFCLNSFFLTNLVWSQIFSLLSVFITVYI

SEQ ID NO: 228 - protein, 55 aa, Streptococcus pneumoniae
MFLFLAIDFIFYSYIFCMSLIFKVNIILSIYLNNISSLNLTDDILIFRLIVGGFH

SEQ ID NO: 229 - protein, 85 aa, Streptococcus pneumoniae
VIPRGDHNHYIKVQTKGYEAALKNKIPSLQSNYQPGTFDEKAVLAKVDQLLADSRSIYKDKPIEQRQIELALGQFTESLKKIKVS

SEQ ID NO: 230 - protein, 81 aa, Streptococcus pneumoniae
MARLEPAKIAKIVLGILLYIIDLIKSSFVLPIPKAAKKSLILISFVPSFNDKNIVIRRPRQITKIMPRFICFLFRIFACIS

SEQ ID NO: 231 - protein, 579 aa, Streptococcus pneumoniae
MELSAIYHRPESEYAYLYKDKKLHIRIRTKKGDIESINLHYGDPFIFMEEFYQDTKEMVKITSGTLFDHWQVEVSVDFARIQYLFELRDTEGQNILYGDKGCVENSLENLHAIGNGFKLPYLHEIDACKVPDWVSNTVWYQIFPERFANGNALLNPEGTLDWDSSVTPKSDDFFGGDLQGIIDHMDYLQDLGITGLYLCPIFESTSNHKYNTTDYFEIDRHFGDKETFRELVDQAHHRGMKVMLDAVFNHIGSQSLQWKNVVKNGEQSAYKDWFHIQQFPVTTEKLVNKRDLPYHVFGFEDYMPKLNTANPEVKNYLLKVATYWIEEFNIDAWRLDVANEIDHQFWKDFRKAVLAKNPDLYILGEVWHTSQPWLNGDEFHAVMNYPLSDSIKDYFLRGIKKTDQFIDEINGEFMYYKQQISEVMFNLLDSHDTERILWTANEDVQLVKSALAFLFLQKGTPCIYYGTELALTGGPDPDCRRCMPWERVSSDNDMLNFMKRLIKIRKYASVIISHGKYSLQEIKSDLVALEWKYEGRILKAIFNQSTEDYLLEKEAVALASNCQELENQLVISPDGFVIF

SEQ ID NO: 232 - protein, 119 aa, Streptococcus pneumoniae
MGQEIKLIRKQFRSTRQEEKQIKEMMREQKVDSFSEFLRQNLLKKNYQDRIFESWFSLWQSQKFEQISRDVYEVLVVARENHQVTQEHVSILLTCVQELIAEVNQVQPLSREFREKYMG

SEQ ID NO: 233 - protein, 121 aa, Streptococcus pneumoniae
MVYRYRTNLKKVFLTDPELHQLNERIAKSNCQNFSVYARKVLLNPNMSFVTINTDTYDQLVFELRRIGNNINQIARAINQSHLISQDQLQELSKGVGELIKEVDKEFQVEVKRLKEFHGSY

SEQ ID NO: 234 - protein, 379 aa, Streptococcus pneumoniae
MVVTKHFATHGKKYRRRLIKYILNLDKTDNLKLVSDFGMSNYLDFPSHAEMVEMYNVNFTNNDKLYESRNDRQEKHQQTIHAHHIIQSFSPEDNLTPEEINRIGYETMMELTGGRFKFIVATHTDKDHVHNHILINAIDRNSDKKLIWNYALERNLRMISDRISKMTGAKIIEKRYSYRDYKKYKESSHKFELKQRLYFLLQQSKSFDDFLEKAKQLHVQIDFSQKHSRFLMTDRTMIKPIRGRQLSKRDLYDEEFFRTHFAKQEIESRLEFLLNRVNSLEDLITKAKELNLTIDLKQKNVTFILEENNQKISLGHQKISDKKLYDVKFFQDYFKNKEVVASEGLENLQEQYHAFQEERDKDKVSTEEIEEAFKTFKEK

SEQ ID NO: 235 - protein, 229 aa, Streptococcus pneumoniae
VELAENQIEKLVDKGVYIKVSFGVKQSGLIFIPNYQLDIMEEENHKKYKVYIRETSSYFVYNKENMDNNCFIKGRTLIRQLSNDSQKLPYRRPTLKSLQEKISEINLMIELSNTNKQYQEIKDELVLEIAEIDMKLEETQEKIATLNKMAEVLINLKSEDHETRKLARYDFSKLNLTESTSLENVNEEIRVLQENLDYYLYEFEKRAIRLEIFVSTLNMEKDVFVIDKF

SEQ ID NO: 236 - protein, 321 aa, Streptococcus pneumoniae
MAIIKKIVVLYGGLSEEREVSENSAKEISKSLLTLGYDVISIDLSQDCSYEIGEIEKSERGLNKQKVEIGSGIIDVCRKVDIVFLATHGGIGENGKLQAIFDVEKIDYTGNSFLSTAISMDKKLSKIVASSVGIKCASNLMVDRIQANDFPIVIKPIRSGSSKGIKIFQNKKQFDIYYKEHPELGSVFVEKYIKGREFSVGILGETVLPVIEIKVKNGFYDYNNKYTVGAAEEVVPAKISEKLTHTLQKSAYKIHKALGFNVYSRTDFIVDEKGDVYFIESNSLPGMTKTSLLPQEAKAAGIDFPNLCERIIELSREIRSQ

SEQ ID NO: 237 - protein, 402 aa, Streptococcus pneumoniae
MKIINGICRYIFDSKGFATIEVEIFLDSGDTGIGAAPRGSTTGHYDIQYNEYYPRGNNFSPIPDGNIEFFNENILPRIINREVEDIEDITELDKHLFDIPEIENYGNVAIACSYAVWEAFSKNKKSPLWKLFFEPGSASKGKVKHLVNIIDGKPDSLLAGFEFLLVSEKEITFQSLLEISNIKNELMIKFKNQGFYTSISNQGALIINTDDFYIILDSLLETLKLYKNRYDIGLDLAMTDRYDSSLGIYKVPWCVSQQQTVTEIMDTYCDWGVKYPLVYLEDPFSDEDLDSWRKFQLIKPLKLQVFGDDFYATNLERISQFKDCADGIVIKPNQVGSVSKTLEVMEYAEKSGISMAFSQRTAETENNIISHLAMSVTSSYLKAGGLDRLDRIAKYNEVLRNG

SEQ ID NO: 238 - protein, 297 aa, Streptococcus pneumoniae
MDNGKISTDGALVNNKNIEVNISSASIRYGISVFEAPKMFLLGSDIYIFRFQDYFNRLKTSCKFLNIELPLDYNKLLYDIKKFIEFVPWQESYALRINVFCPYESELLGEVECALTLSYLDIGIRSKSGVSSKVIKRSNLIRTSNNNLYMIKSPSHYINARKELYSDIEFDDILYVNEKENICELSRSNIFLIKDRTVYTPDLGSGILDGITRKLIIDLCQEHNILIEIKELNYSKLSDFDSAFCVGTTNGITPIRNIDKNIHFDTNNLLLAEIVNYYKEVFSKKGVEKYKEWFVKL

SEQ ID NO: 239 - protein, 270 aa, Streptococcus pneumoniae
MIKDVNYFNERAQIIRRTINDMIFGAESGHFGASLSSVDFINVIYENYVFPENAEFILSKGHAAPALYAKLIESGVLDKDFIYGFREYRSLLTGHPNHRIPTLKFGLGSLGQGPSIGVGMAWVNKRKKSDKKIFVMLGDGELNEGQVWEAFYTCRNLNLQNLVFIIDRNFLQLDGKCEDVANFPNLAQKISSFLGTNPIEVNGNSYDEILNVLDNIDYSQTNVIISNTTKGKGIEFMEGKTEFHSYNILSSEKEVLYKRAMECLGGDKMA

SEQ ID NO: 240 - protein, 305 aa, Streptococcus pneumoniae
MRKTFIDELINKNIEEQNIVVLTGDVGRSTYASKFKEIFPENYLNLGICEANIVGISAGIAGTLEFVPFVMLFSKHLILRALEQINDSILMNKKKVILVGGYSGYSASKEGETHQLLNDISILSSFPDISIYCPYDQSSIQTAINESINNDYSSYIRINKNKILNDVVSRYISQGNKSIIISMGYLGSLLSKKYMEDSDIREFADFILVSKIKPIDWEYWENFLRKYETVYIIEENTLTGGLGEQFKNYFFGLGINIISFGIKPHFGETGDYETLLTNEGLSPDKIFEKIRRINHVQSSEKSIWR

SEQ ID NO: 241 - protein, 402 aa, Streptococcus pneumoniae
MYNLVKRVFGDDNFVKSDGIYLYTDDNKEIIDSCSNSMNVNLGYGVLEIEKVIHEQIRKINFMHTGKGTTYESLMLANRLHDIIKPYGNYKVYFATSGSDCIEAALRISVLYQQKNKRNQESNTRFATFEGSYHGSTLGALSVSGHRKFQKLYNGYIGNCLTIPTRWNLEWEMDFTDITAFVLDSMITNPIGSEMIDRDYLNYLVQICKESGVITIIDEIATSIGRLGCFFGFEDSGISPDIVCISKGLGVGYANIGAVIVKSNIIDSINSADILGHTYNASPIDCKIAMTVLDYIEEHGIFEHVNNLSNYIEYRLKVLKNKLPCISKVSGKGFMWSIHFRNNVNASKVFKQCYNNGLLLLYLEYEEYNHMTFCPPLITSKNQIDSMLDILEKSITEVLHGY

SEQ ID NO: 242 - protein, 264 aa, Streptococcus pneumoniae
MDIKKLGFIIITNETFAFNLVEEVVEKLSILDVNRAIIKLLPKVDETTLIKHYREHLINWNGKEGKSQVPSLGWPAVRNRFSSSVVLILLEGNKQSLSDEILQIKGNTYPERCRQNQIRIKGFNPTYNLMHSSDSAEEALKEAELYFSKKELESFFCGEIGITFEEILNFILELDSIQKGGIRSNSDLENKVNKMCYWKQRIFDLFSSKTKEESRKISEELNFIKSNRSPEDVILYLENESILWSKLERDLYLSHLIIEEISGE

SEQ ID NO: 243 - protein, 394 aa, Streptococcus pneumoniae
MVKIYEETLRDGIQSSELSMLNTEDKKKVIKNFDNAGIEGCCIGFINSSKKENDEINELFQFIITNKLKIVPAVLCRLLIEDFKEIKNIVQCNLFNQLKVYTYIAVSPIRMKVENWSEEIIIEKIIDFLNYCQMENAKITIAFEDASRADKSFLKKLIEIINNYPLVKSVVIADTVGTCNYNSTRDLVYFFRKNLFLSKTIEWHGHNDLGLAVSNALSAIESGADIVHTCTLGIGERCGNTSTEQLIINLIVSECGRRATYKLRYLYDVAKILENKSQFPISPKTPCFGMDSFFTCAGTHASSLYKSYLKNDNNFSIIFSPYDSNIFGREVTVGINSQSGRSSIEYISRKYGLELSQENITSILGLVKQNDLFFREEEFVDYVKQKRVERLDYK

SEQ ID NO: 244 - protein, 453 aa, Streptococcus pneumoniae
MLNKKEWKDLTISKSENDSIISCLYNWGFELPKSKDYTFSLTWYGYNNVSYKYCEKECLTLGELSLLFPQLNDLFWENQKDNIEGRRNFYKNCKNLLGKFNIYSVRDILEISDRDLQFALTNRVGSKEFENSIVSLMYINKLSDDNKAENTLEKKLYFSINNEDSIIPYYENTLGMTAGNYYFTASHRTFFSSTFPDFFKIDVPYKISNSVRNLTRNELRIRASEIIKSELANSENPILKIFDDYAYVRIGKRNMVLRNKFFNGFIAPLFAFFQQRIFDNGKSFFTHFYDLRKNTSQNIPDYLLLNILFPLIDCFEFFLNVSIKYKRLIFPYDFHMQNIMISIYDNQIGFIFQDFDMSKELTVTSFYEQLDFFFEKFVVTNILESINELKLDEKKYIMREMKKIINTKIIIKAESYFGFPSPSEVIFPDFMKQYLRENQNVKERTIKYRSYLR

SEQ ID NO: 245 - protein, 291 aa, Streptococcus pneumoniae
LFIDILKKKKMKIIEAHDALSAYIIDQTKYSADKGDIFEYDGIWISSLCDSIIRGKPDMEVVNITDRLQTIDDILCVTEKHIIVDIDSGGTLAQTASLIEKITLRKIAGIVIEDKIGQKYNSLFGEKNTQLQDSTESFERKIRVAIKSRKNSKTAIIARIESLVLGKSLEDLLYRGNCYIKSGAEALVIHALNSRLDDLYQALKYFKRYFPEIPLIVIPTDFPYVCAEELFESGADLIIYANHLLRSIIKPMEYIAKSILIDGYSNGVENKLLPISEILNYIPLLEEIDEK

SEQ ID NO: 246 - protein, 365 aa, Streptococcus pneumoniae
MKSKDLISSLKLNGVTRFFGVPDTFLYPITSQLANDELIIVPNEGNAVSMAFGYSITTSRMPVIFLQNSGLGNILDPVQSLVGQAVYNHPMLYIIGFRGGTDDAPQHSECGKVTKKLLEISQFDIYEKDYFTNALDTDIRRIIDNIKKKNKSAAILVDKEFFSDIVNIKNYQISDYNDILNKICAVLEKEKDSIVLTSTGYITRHMENVKDTYKKNFVHIPMPGSLGQTISFGAGICMGTSINNKKKKIYIIDGDGSLFMHMGSLALFDYYNLDVTYILLNNYKHLSVGGENTLASSCNFFKLAESMNFDNIYSSDNLEVVDFEEKLNQQGKNFIEIICSNEVTYSLLERMDFNFEEIKQFNMEN

SEQ ID NO: 247 - protein, 263 aa, Streptococcus pneumoniae
MPDRYVEYSQNDYDNIMKLDTLFISQLDSKYKVEYHKLPSLISGEVLKRCGYFSTMPNQLSKVDIIDVSQLESLGNNRELEEIKYSSSENYFLTPAACLHFYPMLEHKEVKECIYSSLVDVFRYENGNFTMGTRQWEFTVREFLAIGNPKFVEEFLEDLKEKFLTIALRFDSTAKIQNACDNFYPTNLNKVKQKFQKYNNLKFELIVHISEKEVSVASFNYHNNHFSKEFNFDSNDTIVTGCVGLGIDRWISLIKESEKDYKL

SEQ ID NO: 248 - protein, 349 aa, Streptococcus pneumoniae
MRKQIISLFHAYLNENTQDWVEIDENFLLYQHLDMFYYYLCKKNNIEPPLMEKFEVRKKVIESRNRQYIKVARDLNAIFEKQSIQVAFLKGIQTSEKYYEEPWIRYYSDLDILVAREMIPGVEKLFYQLGYVFGHLKDNGEIHHATREEILYQKLFTHEIYNLVKKENDNVFINVDINFLFSWKGLSDSEIEFNDIKNDIIYDSKIKINTLDKVMNFIHICCHLYNEARYFALNRSFLGGDPREIQLSRVFEIALILKDLKQEEFNSVVYSSRKLNCDNKVFASIGVTKQLLELNLSILDNYTEELKVKDEFNSYIDKDQKVKYWPISIEDRVFDLKLKVKTCDKIFIN

SEQ ID NO: 249 - protein, 79 aa, Streptococcus pneumoniae
LKYDSEIKNVIKDYIDFEFDINEIDNNVALTDYGVDSLKYISIILALEDYFKIEIPDNYLVFSKSNTIKKLNSIIEELL

SEQ ID NO: 250 - protein, 509 aa, Streptococcus pneumoniae
MKYINSSLKPVDNYYSLEEVTCFDRLLGIFLNSINNSYCDLFYMINNFYRCYKVDDSKNEYDFEREMHILRNFFCIESEKINFSDEYVLTEFIVKNINKYGSVFVPINLKEIYYSAYYKEQDWPHLFLINGYDKEKELFYVIDATQIYSDILTEQNFCITFEILERAYKSYFHQTILNKEKEYIFVVTTVVNELTETEIFHETFKYLFNQSSISSRELEIVYKILTNRDFTLLANLKNITKKKKLFFTIFFEKLRVYELISNKELLYLSRTVETILEEWTIFINRCIKNILKNDTKLVNYDFFVLEEKKIFDFFSKQASRYKERLFEIISSNSNRYNEVFECIQNSGKIITITEDNSRKFRFSFIGDKIYNSWFNDDSPKVRINQDLNYLIVKINVIHKEKDSKFVAGLYCFIDDNLYYFGLDSNYFINLDLMGKTPEIFRKRLETSEVYLKISRQEDSCKFSYSVDGITYFYATSLDIRSCHFSCGIGCKTYSKPTPLCIDFEDLLIG

SEQ ID NO: 251 - protein, 330 aa, Streptococcus pneumoniae
MAMIEVSCLRKDFVKIIKEPGLKGAIRSFIHPEKQIFEAVKDLSFEVPKGQILGFIGANGAGKSTTIKMLTGILKPTSGFCRINGKIPQENRQDYVKDIGVVFGQRTQLWWDLALQETYSVLKEIYDVPDAVFQKRMDFLNDVLDLKEFIKDPVRTLSLGQRMRADIAASLLHNPKVLFLDEPTIGLDVSVKDNIRRAITQINQEEETTILLTTHDLSDIEQLCDRIFMIDKGQEIFDGTVNQLKETFGKMKTLTFELRPGQNHVVSQFVGISDIHVTRKELLLNIQYDSSRYQTADIIQKTLSDFAIRDLKMTDVNIEDIIRRFYRKEL

SEQ ID NO: 252 - protein, 272 aa, Streptococcus pneumoniae
MVKLWKRYKLFISAGMQELITYRVNFFLYRIGDVMGAFVAFYLWRAVFSSSHQSLIRGFSLSDMTFYIIMSFVTNLLTKSDSSFMIGEEVKDGSIIMRLLRPVHFAASYLFTEIGFRWLVFVSVGLPFLIIIIGLKLLSGQPILQISLMTLTYLLSLILAFLINFFFNICFGFSAFVFKNLWGSNLLKNSLVAFMSGSLIPLSFFPKIIADILYFLPFSSLIYTPVMIIVGKYNISQMIQAVLLQLFWLLVMIALSQIIWKRVQSHITIQGG

SEQ ID NO: 253 - protein, 139 aa, Streptococcus pneumoniae
LLVGISLLSATVTSLTWTWTKVFIFLISIPFATLIYTSLKIATASIAFWTKQSGAVIYIFYMFNDFAKYPVVIYNSFLRWLISFIIPFAFTAYYPASYFLKDKDGLFNIGGLILISLIFFTISLKLWNKDLDAYESSGS

SEQ ID NO: 254 - protein, 54 aa, Streptococcus pneumoniae
MDEVFKFYCTNIIRVIFIKWLFCLKSMNHTNLTLVTTTFKQFNSTSLGNHHAMV

SEQ ID NO: 255 - protein, 53 aa, Streptococcus pneumoniae
MQAFDGSTEFIHNGKGEKDSSKYQINGAGRCEVPVYVPKTDWDWIIYPQGIYD

SEQ ID NO: 256 - protein, 48 aa, Streptococcus pneumoniae
MRVKRDYPNYKIYITENGLGYKDEFVDNTVYDDGRIDYDYVKKHLEVI

SEQ ID NO: 257 - protein, 38 aa, Streptococcus pneumoniae
MEWIINIIRGIRYIGREAGVTFVEPSQTSIKSFDITIL

SEQ ID NO: 258 - protein, 246 aa, Streptococcus pneumoniae
VRHYKDYISQRSDWELAGIYADEGISGTQVGKRQDFQRLINDCVNGEIDYIVTKAIARFARNTLDTLKYVRMLNDMQIGVYFEEENIDILTMDGELLLTILSSVAQQEVENTSAHVKKGLKMKMERGELVGFQGCLGYDYDVETKQISINKKESKIVRYIFERYLEGIGGKVIARELDELGYKSPRGLEHWNDTTVLGIIKNEKYKGDILIGKTFTVDPISKRRLSNFGEEDKYYIKDNHEPIISK

SEQ ID NO: 259 - protein, 270 aa, Streptococcus pneumoniae
MYAFSSMLECGFCGSILSRRSCHCRSDYRKVVWHCVTSIKKGKKFCKHSKGLEKLAIEGAFMEAYRQLYHSNENLMTDLLETIESELNDNSLNKELKRITNKLRTLLKKEENLVNLRLEGKISDTIYDEKYNEISSEKEFLAEEKVNIETTLKSEIDVKKRLTEFKHLLSSQKMLTEFDRAVFESIVEKIIVGGVNSNGEIDPAMLTIIFKTGETQNKDGKQFKSKRKNAKLETDKLCPQNSDEDKKLYSQGTDNTRGVCSVAGSILVSQ

SEQ ID NO: 260 - protein, 195 aa, Streptococcus pneumoniae
MGGNPPIKKYSIVDKIVLSTKIKRIIIFTVFRENWEPYMKKYTEVFQSQFPNLNIDYLLLDTEQIDLDSYLDADLIIIGGGNTEKYIATYVNQEFKNYIDHMLNKGAKVIGFSAGALLLGEKVYVSPNDNSDHQIKIKDGLGLFSQFLISVYYDSWNDKANKDRAEELVNVPIIPLNDHSCLVLDKLGNIIEKID

SEQ ID NO: 261 - protein, 140 aa, Streptococcus pneumoniae
MDFSSKIAINTGWSDDKKYCVTDQNQQKYFLRVSDKEKLDSKKFEFDMMGKVASLGVPMCKPISIELCDDEVHSLHEWIDGRDAIDSILTYSENQQYTYGVEAGKILRKIHTIPATEVCEDWEIFFNLKIDDKISNEMIW

SEQ ID NO: 262 - protein, 38 aa, Streptococcus pneumoniae
LCSALKNSYDIELIKVLSNKAHLYLPIETVTPQTVSTS

SEQ ID NO: 263 - protein, 53 aa, Streptococcus pneumoniae
LVKNPFIEIERIERTWLTAHLYRKFDKYFHKTRPPIKVFEHLIGGLFIMKTFT

SEQ ID NO: 264 - protein, 49 aa, Streptococcus pneumoniae
MIKIYFTKFSENHNPFCKIFEIIFTSLIFQSILNKNKKNPLHQGETNVV

SEQ ID NO: 265 - protein, 123 aa, Streptococcus pneumoniae
MSQVKGLCVLDVDGTLILEEVIDLLGREAGHEAEISQITSRAMRGELVFESSLRKRVSLLEGLPILVFDNVFNSIHLSLNVPEFISILQKNGILVGLVSGGFTPIVGEISKIPWYCLFHCQPA

SEQ ID NO: 266 - protein, 41 aa, Streptococcus pneumoniae
MLKSAELGIAFCSKEMLKKEIPHHVDKRDFLEVLPLIDCLE

SEQ ID NO: 267 - protein, 46 aa, Streptococcus pneumoniae
MFGNWFFKAFVCSLERLAQDRTMNWFSCIGNKNTVAFVPILIGCFA

SEQ ID NO: 268 - protein, 1919 aa, Streptococcus pneumoniae
MEKYFGEKQERFSFRKLSVGLVSATISSLFFMSVLASSSVDAQETAGVHYKYVADSELSSEEKKQLVYDIPTYVENDDETYYLVYKLNSQNQLAELPNTGSKNERQALVAGASLAALGILIFAVSKKKVKNKTVLHLVLVAGIGNGVLVSVHALENHLLLNYNTDYELTSGEKLPLPKEISGYTYIGYIKEGKTTSDFEVSNQEKSAATPTKQQKVDYNVTPNFVDHPSTVQAIQEQTPVSSTKPTEVQVVEKPFSTKLINPRKEEKQSSDSQEQLAEHKNLETKKEEKISPKEKTGVNTLNPQDEVLSGQLNKPELLYREETIETKIDFQEEIQENPDLAEGTVRVKQEGKLGKKVEIVRIFSVNKEEVSREIVSTSTTAPSPRIVEKGTKKTQVIKEQPETGVEHKDVQSGAIVEPAIQPELPEAVVSDKGVPEVQPALSEAVVTDKGETEVQPESSDTVVSDKGEPKQVAPLPEYKGNIEQVKPETPVEKTKEQGPEKTEEVPVKPTEETPVNPNEGTTEGTSIQGAENPVQPAEESTTNSEKVSPDTSSENTGEVSNKPSDSKPPVEESNQPENSGNTTSENGQTEPEPSNGNSTENVSTKSNTSNSNGNEEIKQENELDPDKKVEDPEKTLELRNVSDLELYSLSNGTYKQHISLEQVPSNPNSYFVKVKSSSFKDVYLPVASISEERKNDKILYKITAKVEKLQQEIESRYKDNFTFYLAKKGTEETTNFTSFSNLVKAINQNLSGTYHLGASLNANEVELSTDDKSYIKGTFTGQLIGEKDGKHYAIYNLKKPLFESLRGATIEKLSLKNVSISGKDDIGSLANEAQNNTKIKQVHVDGVLAGERGIGGLLAKADQSSITESSFKGRIVNTYETTASYNIGGLVGHLTGSKASLTKSKATVVISSNTNSSDQTVGGIAGLVDKDAHIQNSYSEGDINNSQRFGKVAGIAGNLWDRESNSENHAGRLTNVLSDVNVTNGNAISGYHYNGMKITDAFSNKANKVFNVTLEKDEVVSKESFEERGTMLDASQIASKKAEINLLTPPIVKPLSTSGKKDSDFSKIAHYQANRALVYKNIEKLLPFYNKATIVKYGNLVKENSILYQKELLSAVMMKDDQVITDIISNKQTANKLLLHYKDHSSEKFDLRYQADFAKLAEYSLGDTGLLYTPNQFLYDQDSIINQVLPELQQVAYDSEAIRKTLGISPEVKQTELYMEDQFTKTKQDLANSLKKLLSADAGLAGDNPVTRGYLVDKIKNNKEALLLGLTYLERWYNFSYGQVNVKNLVMYHLDFFGKGNTSPLDTLIELGKSGFNNLLAKNNVDTYAISLASHHGTTDLFSTLENYRKVFLPDKTNNDWFKSQTKAYIVEEKSNIEEVKTKQGLVGTKYSIGVYDRITSDSWKYRNMVLPLLTLPERSVFVISTISSLGFGAYDRYRNKEHQANGDLNSFVEKSAHETAERQRDHYDYWYRILDEKGREKLYRNILLYDAYKFGTDHTEGKATEVANFDNPNPAMKHFFGPVGNKVGHNGHGAYATGDAVYYMGYRMLDKDGAITYTHEMTHDSDQDIYLGGYGRRSGLGPEFFAKGLLQAPDQPSDATITINSILKHKTSDSTEGQRLQVLDPTTRFNDAADLQNYVHNMFDVVYMLEYLEGQSIVKQLDAYQKMTALRKIENKYVKDPADGNDVYATNVVKNLTEDEAKKLTSFDSLIDNNILSAREYKAGTYERNGYFTIKLFAPIFSALSSEKGTPGDLMGRRIAYELLAAKGFKDGMVPYISNQYEEDAKQQGQTINLYGKERGLVTDELVLKKVFDGKYKTWAEFKTAMYQERVDQFGNLKQVTFKDPTKRWPSYGTKTINNVDELQKLMDEAVLQDATGTRWSNYNPEIDSAVHKLKRAIFKAYLAQTNDFRSSIFENKK

SEQ ID NO: 269 - protein, 145 aa, Streptococcus pneumoniae
VLGGRANSVTSCTTNSHWNLTFTTKHVTCFSSLVDDIVHGNNREVHEGHIDDWTKSCHGCSCCSSRDGSFRNRTVTDTFWTKFFKHSNRSTEVSSEDTDVFSHQEHIFIATHFLRHSKDNGVTEGHCFCFHFISFSLVCVNIFKG

SEQ ID NO: 270 - protein, 129 aa, Streptococcus pneumoniae
MDMFYIGHFLDIRRDTVTVVNAIENDWQVPDRSHVHCFVENTFIGRTISKEADNDFTGILHLLTEGCTDSDPHTTTYDTIGTKVPSIKVSDMHRSTFPFTGSSVFTKDFSHHSVEVNPFSNSLPVSTVV

SEQ ID NO: 271 - protein, 834 aa, Streptococcus pneumoniae
MKINKKYLVGSAAALILSVCSYELGLYQARTVKENNRVSYIDGKQATQKTENLTPDEVSKREGINAEQIVIKITDQGYVTSHGDHYHYYNGKVPYDAIFSEELLMKDPNYKLKDEDIVNEVKGGYVIKVDGKYYVYLKDAAHADNVRTKEEINRQKQEHSQHREGGTSTNDGAVAFARSQGRYTTDDGYIFNASDIIEDTGDAYIVPHGDHYHYIPKNELSASELAAAEAFLSGRENLSNLRTYRRQNSDNTPRTNWVPSVSNPGTTNTNTSNNSNTNSQASQSNDIDSLLKQLYKLPLSQRHVESDGLIFDPAQITSRTARGVAVPHGNHYHFIPYEQMSELEKRIARIIPLRYRSNHWVPDSRPEQPSPQSTPEPSPSLQPAPNPQPAPSNPIDEKLVKEAVRKVGDGYVFEENGVSRYIPAKDLSAETAAGIDSKLAKQESLSHKLGAKKTDLPSSDREFYNKAYDLLARIHQDLLDNKGRQVDFEALDNLLERLKDVSSDKVKLVDDILAFLAPIRHPERLGKPNAQITYTDDEIQVAKLAGKYTTEDGYIFDPRDITSDEGDAYVTPHMTHSHWIKKDSLSEAERAAAQAYAKEKGLTPPSTDHQDSGNTEAKGAEAIYNRVKAAKKVPLDRMPYNLQYTVEVKNGSLIIPHYDHYHNIKFEWFDEGLYEAPKGYTLEDLLATVKYYVEHPNERPHSDNGFGNASDHVQRNKNGQADTNQTEKPQTEKPEEETPREEKPQSEKPESPKPTEEPEESPEESEEPQVETEKVEEKLREAEDLLGKIQDPIIKSNAKETLTGLKNNLLFGTQDNNTIMAEAEKLLALLKESK

SEQ ID NO: 272 - protein, 101 aa, Streptococcus pneumoniae
MDESFDDIAHEQFTSNLTTKTDNVGVQLFFSIKGCCHITNQGRANTWNFIYSVVDTNTSTTDTYSKISLAASYSFPYFFTKDWVVSPCMVICTKVNDFISF

SEQ ID NO: 273 - protein, 114 aa, Streptococcus pneumoniae
MLDFQDRSPWLEGQKEIDLSYDLFSTDAVTLDELQSRTIALRSLKHDKGLKVHFAEFPNLIIWSTLNKGPFITFEPWSGLSTFLEEGDHLEDKKNVCLLEANQVEELGFEIEVL

SEQ ID NO: 274 - protein, 50 aa, Streptococcus pneumoniae
MKIKEQTRKLAAGCSKHSFEVVDETDEVSNHTYGKATLTWFEEIFEEYKN

SEQ ID NO: 275 - protein, 78 aa, Streptococcus pneumoniae
LIESQVFSSLQVCCLNLCHLKFQHFDTCLVFLLVFLDFQNLLAHFPIGIKTRLIGFFQVPKSGITKFIQHLDMQLGTH

SEQ ID NO: 276 - protein, 46 aa, Streptococcus pneumoniae
MVMLTMNIYKMLPNSSQNRQINHLTIYTADTTTILQDFPTDDNFIT

SEQ ID NO: 277 - protein, 55 aa, Streptococcus pneumoniae
MTNNICRRTSSQHHIHGINDNRLPCTRFTSQDSHPLFKIEGNSLNNGKVFYRNFK

SEQ ID NO: 278 - protein, 168 aa, Streptococcus pneumoniae
MPHTRDNWQTRFKNSSYHNFFVKGPEILNRTTSTTNNEQIQIVPLISTRNISSNFLRSPFTLNLGRIKKDVNTWESPADGRDNISNNGSTTAGYYTNSLRKLGQSLLEAFLKQAFFCQFFLKLFKLNRKRPNPIRLSFFNDDGVATTWFIDLYTPNHIDLHSFFQVKP

SEQ ID NO: 279 - protein, 154 aa, Streptococcus pneumoniae
LAIIRNRTCSLKLINGHLTFWTLHFLTSTRILIELATINLNCRIHRGNLGNRPSQASNRFINKLFIQGRQNRGFCDHFPTSILSRRGIAQSNFPLIDLTLVLHKLDHACRLANRNRQNTHHIRIQGSTMTNFLGSQNLTQFKNRIMRGHSCFFF

SEQ ID NO: 280 - protein, 374 aa, Streptococcus pneumoniae
MFALRKPGNIYTRITNPTTAALEGGVEALATASGMTAVTYTILAIAHAGDHVVAASTIYGGTFNLLKEPLPRYGITTTFVDIDNLEEVEAAIKDNTKLVLIETLGNPLINIPDLEKLAEIAHKHQIPLVSDNTFATPYLINVFSHGVDIAIHSATKFIGGHGTTIGGIIVDSGSFDWTASGKFPQFVDEGPSCHNLSYTRDVGAAAFIIAVRVQLLRDTGAALSPFNAFLLLQRLETLSLRVERHVQNAETIVDFLVNHPKVEKVNYPKLADSPYHALAEKYLPKGVGSIFTFHVKGGEAEARKVIDNLEIFSDLANVADAKSLVVHPATTTHGQLSDKDLEAAGVTPNQIRLSIGLENVEDLIEDLRLALEKI

SEQ ID NO: 281 - protein, 40 aa, Streptococcus pneumoniae
MTRDFKFETLQLHAVQVVAPATKSRAVPIYQTTFFVFDDT

SEQ ID NO: 282 - protein, 248 aa, Streptococcus pneumoniae
MSQKKNNKKKNKRKNLLTNILAGFLILLSLALIFNTQIRNIFIVWNTNKYQVSQVSKEKLEENQDTEGNFDFDSVKAISSEAVLTSQWDAQKLPVIGGIAIPELEMNLPIFKGLDNVNLFYGAGTMKREQVMGEGNYSLASHHIFGVDNANKMLFSPLDNAKNGMKIYLTDKNKVYTYEIREVKRVTPDRVDEVDDRDGVNEITLVTCEDLAATERIIVKGDLKETKDYSQTSNEILTAFNQPYKQFY

SEQ ID NO: 283 - protein, 144 aa, Streptococcus pneumoniae
MRWNIGCHPNRDTSCSINQKVWKTRWQDQGFPFIGIIVINEINCIFVDITKHFQSNLAHTCLGITLSGSTISIHGTKIPMTIYKHVTVAPPLSHTDHGFINRGIPVWVIFTHDIPCNTSRFFMGFVWGHTQFIHSVENATVNRF

SEQ ID NO: 284 - protein, 231 aa, Streptococcus pneumoniae
LKKKWFFADYYDTTIILLALISVILVLLGFAEMIDLDNPPYSIIDLVIWGVFVIDYSWRFFITKRKWRFILENIFDLLAILPLNAIFTVFRLGRIFRLVKLTKLLKLTRLLRIIGLTGKLERKISRFLRTNGLIYILYVNIFIILVGSSILSVVEEKSFSDSLWWALVTVTTVGYGDIVPVSLLGKWLAVLLMLVGIGTIGMLTSALTNFFVKDNPDEQIKLDKLKDELSS

SEQ ID NO: 285 - protein, 80 aa, Streptococcus pneumoniae
VVDFKQTRQDPHDITIYSWLRQVKSNTGNGSCCVRSNPFQAGNSFIGIWKLATKVSHNLLGCSLHIANSRIITQALPSFQ

SEQ ID NO: 286 - protein, 162 aa, Streptococcus pneumoniae
LINSQLIPLVQVVVNQGRKGIVGSCNSMHISSKVEVDVFHWQNLCIPTTSSTTLDPHDWTKRRFADSNHGFLANLVQGIRKTNGKRRLSFTCRCWVDGSNQDQFTDWIALNCTNFIKAEFSLVLSVQLQIVVRNTKFLYNINNWLQLNTLCDFNICFHSKFL

SEQ ID NO: 287 - protein, 188 aa, Streptococcus pneumoniae
MLFIIGHLNFPTAGSFIDSTLHRLGNRVCIHDDMAFTVTSSTSNSLDESTFVAKETFLVSIENSYEAHFRNVNSFTEQVNSDQDIKDTQAQVTDNLRPFQGLDIRVHVLDLDTHFLEVVGQILCHFLGQSCDKGTLIFFNAGIDFTQEVINLSHSRTDFHLWIQESRWTNDLLNHCLGLFIFIVTRCR

SEQ ID NO: 288 - protein, 116 aa, Streptococcus pneumoniae
MNVTLKLLPTERTIVQSRRQTETIINQHFFTRTVSIVHALDLPYGHMTLVNHNQEIIWEEVEKRIRRLSFAPSIHVARIIFNPIGIAHLTQHFDIILCPLFQTLGFKQFTFLFKDS

SEQ ID NO: 289 - protein, 75 aa, Streptococcus pneumoniae
MIHFSQHLTCQSLNFTNTVNFVSKKFYSKGMFISGSWENLYHIPTNAKSSALEINIIAFKLNIDQVIQEFITRNL

SEQ ID NO: 290 - protein, 110 aa, Streptococcus pneumoniae
VAKLVNLVIDRTILLNIGIARRDIGLWLVIIIVGYEILNCIFREKFLKLPIELTSQSFIVGNNQSWFIDFRNDLTHSIRLPCSSRPHQNLSFFSPLNVIHQLLDSLGLIS

SEQ ID NO: 291 - protein, 122 aa, Streptococcus pneumoniae
MNITQTDFLAVNLVFAISTTIDMAFHPDFLTCILDKSVMIIQSHNYRSIIERFATFGSSKDDIRHLAPTETLDTRLPQSPTQTFCNIGLSRSIGSNNCRHTLVKNDLGLISKRLEPLNFDFL

SEQ ID NO: 292 - protein, 77 aa, Streptococcus pneumoniae
MGFIVCNHLKLACFNLRNHDLIDKFLDLGHILIQKKGTKKGFKGITKNGVTIATTRFFFPFTQLDKLVKLAITRKTS

SEQ ID NO: 293 - protein, 65 aa, Streptococcus pneumoniae
LFTCFSKLDNKTASTTYISHKFFTAIPVCFEFFKGFWFPRKDTTKKNIFIPMFLVECFNFWVELR

SEQ ID NO: 294 - protein, 216 aa, Streptococcus pneumoniae
VVRELTGEIYFGDHILEERKARDINDYSYEEVERIIRKAFEIARNRRKIVTSIDKQNVLATSKLWRKVAEEVAQDFSDVTLEHQLVDSAAMLMITNPAKFDVIVTENLFGDILSDESSVLSGTLGVMPSASHSENGPSLYEPIHGSAPDIAGQGIANPISMILSVVMMLRDSFGRYEDTERIKRAVETSLAAGILTRDIGGQASTKEMMEAIIARL

SEQ ID NO: 295 - protein, 105 aa, Streptococcus pneumoniae
MAKKIVALVGDGIGPEIMEAGLEVLEALAEKTGFDYEIDRRPFGGADIDAAGPPLPDETLKASREADAILLVAIGSPQYDGVAVRPEQGLMALRKNSIFTLIFVL

SEQ ID NO: 296 - protein, 83 aa, Streptococcus pneumoniae
LANIESHCNFFQSSIFSSLPNTIDSLFNTSCTILDSSKAICHCHSEVIMTVRRIDDLTIRLDILNQVFEDGTTFLWCGKSYIF

SEQ ID NO: 297 - protein, 65 aa, Streptococcus pneumoniae
MPRNRFSFTVRVTREKNFISFFSFFFQVIDKRAFSSDIDILRFIIIFNIDGHTGFLQITDMPDTG

SEQ ID NO: 298 - protein, 40 aa, Streptococcus pneumoniae
MKIKAQTRKLATGCSKHCFEVVDKTDEVSSKYCFEVADGS

SEQ ID NO: 299 - protein, 85 aa, Streptococcus pneumoniae
VHAHTDKLCNGCNRIFNSIISHHTIFRERNKLSHKAIKSTRQEMGPCHVVFIEFFITLHRRLIGNHDNFLTNLVGSGRVRNDGST

SEQ ID NO: 300 - protein, 57 aa, Streptococcus pneumoniae
VNHCHWKLFIQNLGITFSLIVTLIRMTDSHVVGTDKDMILLVNSLFLIFDIDKLRLS

SEQ ID NO: 301 - protein, 84 aa, Streptococcus pneumoniae
VGNNDILWSKRTISINGFNDFLNTCIAVSTTLCNDDTFLIKRKIFIYKIFCMRNPVSMNTNYNFFNTWLQDKFFNCMNQNRSIT

SEQ ID NO: 302 - protein, 86 aa, Streptococcus pneumoniae
LVAPVASSTRFFKNNDSLTSWNNGFIIITINTIISYQRISKGQDLSIIRLVCNGFLVAGHPCIKDDFACYINICSEGLAFKNCAIF

SEQ ID NO: 303 - protein, 39 aa, Streptococcus pneumoniae
VVCYFYITIDWSWVHEDCCFFQTIVTFLSQAMLGMVVFF

SEQ ID NO: 304 - protein, 59 aa, Streptococcus pneumoniae
MAFVLHTEKHHDINLINDFINGYKLSIVCKLLTSPFLRSREKEFSSQAFQNLHIGFGNA

SEQ ID NO: 305 - protein, 69 aa, Streptococcus pneumoniae
VVQVTCNSNFKTLKVAKFLINGHQIKQALARVLARTISTIDDGSRNRWTSNQFSIVVDLWMANHTDIHS

SEQ ID NO: 306 - protein, 56 aa, Streptococcus pneumoniae
MCPCRILKEEIGNNRMVFIGNLGSIFKLNSSLDQFHYLINSEVFHGHHMVQCLLIF

SEQ ID NO: 307 - protein, 83 aa, Streptococcus pneumoniae
  misc_feature 75...77: Xaa is any amino acid
VQFHLIIFQNLFCSLDIVIDSLTTNTKLLSYLSKTVIISVVKLYIIHLLICQKRRIKFKERIHTIGFFDSKLTIXXXFHSLIN

SEQ ID NO: 308 - protein, 51 aa, Streptococcus pneumoniae
MHFHIIKLVNHFQLLIKLNRISHPNLHIKSSFLSLVLLFYQKEQDFAIMVI

SEQ ID NO: 309 - protein, 47 aa, Streptococcus pneumoniae
MTGKKGFLFLNCHICMVTTTTCFLKERVESELLIFFYISPNRCLITV

SEQ ID NO: 310 - protein, 148 aa, Streptococcus pneumoniae
LNRSILDNITLKHEVTSQKIEEVCKAVQIYDEIMAMPMKFNTIISEMGSNISGGQRQRIALARALINNPSIVILDEATSALDTINEERITKYIKSQGCTQIIVAHRLSTIKDADIIVVMKGGKIVESGNHKYLMDLGGEYYSLYTKRK

SEQ ID NO: 311 - protein, 38 aa, Streptococcus pneumoniae
LFKGGVTISRTPLSSEDTVMIDATEVKINRPKKKTISE

SEQ ID NO: 312 - protein, 47 aa, Streptococcus pneumoniae
MAGKKDFLFLNCHICMVTTTTCFLKERVESELLIFFYILLNRCLITV

SEQ ID NO: 313 - protein, 137 aa, Streptococcus pneumoniae
MYQDEAGFGRISKLGSCWSPIGVGPHVHSHYIREFHYCYGAVDAHTGESFFLIAGGCNTEWMNSFLEELSQAYPDDYLLLVMDNAIWHKSSTLKIPTNIGFTFIPPYTPEMNPLNKCGKRFVNVDLRIRPFELWKMS

SEQ ID NO: 314 - protein, 98 aa, Streptococcus pneumoniae
LLQSPYAIDTINLKKDFLEKPIDIEKFKAFLEKEEIPLAIAWQGDSLHFYTKDRSILDNHLDHLLEKMVNDPEKLSDFSMDKSLDDTIDEAKSQITFK

SEQ ID NO: 315 - protein, 95 aa, Streptococcus pneumoniae
MKVVNLYDLKQMGNKGGCTIQLIHHFPFGMGLGHLKKDYIEFKRVGIFDGKAVEVTLREPYSRDILQVVKSIKQRQKLIAYRYKEGKLLFVKKEV

SEQ ID NO: 316 - protein, 141 aa, Streptococcus pneumoniae
MKPSGQEFPHPIFYSLFCFYTDTLGINSQVMQFSFERLLFQFCLNCWHLVMRSQNHNCRPSTRKVGCIGPIFFGHLLNHRKFSYQVLTIALMEEISLDCLPSGHHVSCQQGSNRYIGDRTCSNSFLIRQFFRQDTTAVAST

SEQ ID NO: 317 - protein, 74 aa, Streptococcus pneumoniae
LQVWYNLQSDFEQEITLIMWNPFANLVFNQPLISFFADLNLKILGYSYTDRVKTWPDIGTGCRYNNLHLILLAP

SEQ ID NO: 318 - protein, 69 aa, Streptococcus pneumoniae
LRQNRCYNCFHDHSCSWKSSRITSLHGCLVRFVGFDIHTHKRFIKSRNGFHDPTNNDGLPISHTTFKTT

SEQ ID NO: 319 - protein, 139 aa, Streptococcus pneumoniae
LAAFTITSLKAKTKFHPFKGIDRDNSLSQSCIQFSIPLDIGTKTNWNASDDCLHNPTDGITITFDLVNIVLDFLFSFLVDNRNFRLGSSLLNFSDCQIFRNIDFLATKDHDMVGNLHIQLSQETFGYCTNCHPHGGFTS

SEQ ID NO: 320 - protein, 96 aa, Streptococcus pneumoniae
MTWARMSNFPLAFKAVFNVLRRHDVQPFLVVLIDDIHSNRRPCRLPVANARSKDNLVILNLHTTTTTVATLTASKVLIDILSCQWKSSWNSLNNSC

SEQ ID NO: 321 - protein, 175 aa, Streptococcus pneumoniae
MHDLAITGSRFDGMANSVAKIEVKTNTIVQLIFNHHLALHLTRMFNQGLCMFQNTLNRTIQSRQESPQFWILNQAILDNFTHPFNQLSFSEGFKNKWINQNPIWLGKGPHHIFSKWCVNTCLSTDRRINLSCQTSRNLNKVNTPHIGRGYKSSQVPNNATTKSNDSIATSQTLLD

SEQ ID NO: 322 - protein, 56 aa, Streptococcus pneumoniae
MVICHNDYLLRLPEFSQPLTSLGHTTFFNLNIIRMMRNIDSDFHRRVSLSLLVFFC

SEQ ID NO: 323 - protein, 50 aa, Streptococcus pneumoniae
LIEGHLVFADKPAQALVLLRKVGSPKKVSFLTLHLYFLILKIDILKITGF

SEQ ID NO: 324 - protein, 58 aa, Streptococcus pneumoniae
MAVTKSQVFSRQGFDFSILGQDLTRLQDVSNLATIGTRIHKDSTANASWNTTSKLKAS

SEQ ID NO: 325 - protein, 103 aa, Streptococcus pneumoniae
MTEGNASCFNQVSPSFCFNGIAINRNVIELVTQDDKSTNPTITNDDIACIAKNHPRDIFLVGKFHNASQLKTISWKDQIISLSTYFCITIAMQGFLKTDINSF

SEQ ID NO: 326 - protein, 39 aa, Streptococcus pneumoniae
MRLRDLRRVDFPDPDGPIKAVISLGWKDRETLFKAFFLL

SEQ ID NO: 327 - protein, 45 aa, Streptococcus pneumoniae
LKNHSNVFTHFINVDFWTVDINSTIENLPSYFSNINGIIHAIETA

SEQ ID NO: 328 - protein, 40 aa, Streptococcus pneumoniae
LHINPLNGFIFTIVNMDILSRKGYFFFRKGKDMLLIPVIC

SEQ ID NO: 329 - protein, 134 aa, Streptococcus pneumoniae
MTIHIQVVKTNMVILADRLFQGFILRSTDKFFIKIRLVRSHNLRFNSMDFSTVAVHENKGRHHMDELLPRFIINSKATVAKKSIVAQGFRFDGNFFRKTRQTNHLNIIFCDNPDQIIVFQNGLITNSQFNRLHP

SEQ ID NO: 330 - protein, 56 aa, Streptococcus pneumoniae
LGHSKAEEHETICSHPFDDHTTETIPNQVKGRDMTSSETLPFPSKNQNQGKAKQNP

SEQ ID NO: 331 - protein, 90 aa, Streptococcus pneumoniae
LLLSCRKVIVCFIFSSTWNKNFFNLAFSWNFDNCIRGFFSINSNLFGNMTSLWINIVGPCRGYIAILSVNCNRIFTTVFCFIFFKTNSRT

SEQ ID NO: 332 - protein, 129 aa, Streptococcus pneumoniae
MVKRRIRRGTREPEKVVVPEQSSIPSYPVSVTSNQGTDVAVEPAKAVAPTTGWKQENGMWYFYNTDGSMATGWVQVNGSWYYLNSNGSMKVNQWFQVGGKWYYVNTSGELAVNTSIDGYRVNDNGEWVR

SEQ ID NO: 333 - protein, 49 aa, Streptococcus pneumoniae
MRFIVGRFTSFSLGIEFSPTSKLDDLLFKIAFLMILATWIKARKTKGAT

SEQ ID NO: 334 - protein, 60 aa, Streptococcus pneumoniae
MANDNKSHYLIYRVLGISFEEGENIDLYQNKGRFLYKYAGSFLEEAAVLSFNEKFGTENT

SEQ ID NO: 335 - protein, 149 aa, Streptococcus pneumoniae
LVNCKPLEAYRQLEEAELVGCWVHVRRKFFEATPKQADKSSLGAKGLAYCDQLFALERDWETLSADERLQKRQEELQPLMEDFFAWCRRQSVLSGSKLGRAIEYSLKYEETFKTILKDGHLVLSNNLAERAIKSLVMGRSKRVQWTLLA

SEQ ID NO: 336 - protein, 101 aa, Streptococcus pneumoniae
MFPVETEEITYKRKKSKGKCQALLAQFDSEEVHHQVEESICSDCQGDLKEIGATLQRQELVFIPAQLKRIDHIQHAYKCQACSDKNPSDKIVKAPIPKAPL

SEQ ID NO: 337 - protein, 64 aa, Streptococcus pneumoniae
LKIIQQQSATIDSLTNELALLREQVAYLTQKLYGKSSEKSVCPSGQLNLFEEESPSEEDGDVPS

SEQ ID NO: 338 - protein, 37 aa, Streptococcus pneumoniae
LTIPVKDFKAVFTSTTKEKDLTGERIQFKVGFNQISQ

SEQ ID NO: 339 - protein, 101 aa, Streptococcus pneumoniae
LVCQTIKYWHKFHLHIGRCKLLIGLIPVLNFFIRADIDCLLVLLSLIDRQNGKQFNLCQWIIASNGLNDSFEIIESLIHRNILSDIICPNQKKNFIYCSTI

SEQ ID NO: 340 - protein, 47 aa, Streptococcus pneumoniae
MIFSCSDSCFSIILLDGDIHENTTFSPLSILFISHRFNSLIGNEVPH

SEQ ID NO: 341 - protein, 56 aa, Streptococcus pneumoniae
MPSKDNIRSPIDHLVIKSFLFFSWFQSILNTHLRHDNGDICFLLCPFNFSLHLIFV

SEQ ID NO: 342 - protein, 39 aa, Streptococcus pneumoniae
MVSSKSPIAKSACLVHLLEPRSHILKIFMKVIGTVFFFS

SEQ ID NO: 343 - protein, 71 aa, Streptococcus pneumoniae
VVEQIPVGHNSGSFFLFLLLRLLLSPLLRNSISFLTSQGIPWKLSNNKTKPIDKPTASKSIATNPLLLHLR

SEQ ID NO: 344 - protein, 50 aa, Streptococcus pneumoniae
  misc_feature 45...46: Xaa is any amino acid
MSCTKIGVPFKKLTKKACKGYKILTRLSSQWQKEAPNQSRSAAIXXHSIH

SEQ ID NO: 345 - protein, 74 aa, Streptococcus pneumoniae
MNQIQIQIIQAQFFYRFFQSLTSLLIGLLTIPKLGSYEHFFTWNSAIFDCLTNTFFILINRRRINMTITSLQGF

SEQ ID NO: 346 - protein, 37 aa, Streptococcus pneumoniae
MLLLISLTQLIIFLFFERFNLLLKTFLLVDLKSNKSA

SEQ ID NO: 347 - protein, 37 aa, Streptococcus pneumoniae
LIFIEYKIADKTITIIGLSRVNVGRRIALLIAYFIAK

SEQ ID NO: 348 - protein, 72 aa, Streptococcus pneumoniae
VIPRYVTKHQGWDHNPHTITNSDDDPATLVTFRTFKFNVGNCTIPKNDQNGSSQKFSGILQCPCEIHLLDSP

SEQ ID NO: 349 - protein, 226 aa, Streptococcus pneumoniae
VVPKTATSTETKTITRIIHYVDKVTNQNVKEDVVQPVTLSRTKTENKVTGVVTYGEWTTGNWDEVISGKIDKYKDPDIPTVESQEVTSDSSDKEITVRYDRLSTPDKPTPEKPEIPSPQEPGTPGEPTPEKPIPQPNPEHPSVPTPNPELPNQETPTPDKPTPEPGTPKTETPVNPDPEVPTYETGKREELPNTGTEANATLASAGIMTLLAGLGLGFFKKKEDEK

SEQ ID NO: 350 - protein, 47 aa, Streptococcus pneumoniae
MAYSTDFKQRALDSIKEGHSHVEAAKFFGVGVRTLFTWEKKDVNKDT

SEQ ID NO: 351 - protein, 57 aa, Streptococcus pneumoniae
MPILQAKIDSFRPLFDGLTSRFKVGAGLFLKRFSFSRVKQILLALPQFSMMNPIVNG

SEQ ID NO: 352 - protein, 58 aa, Streptococcus pneumoniae
MAVQANWSFDITHDSSFFFSNQKRGLNFSQMCFKDRRRNGFFDRKIFKFKFNNPIQIF

SEQ ID NO: 353 - protein, 76 aa, Streptococcus pneumoniae
LFLQIKGIKPNHTIALASYIEQSFFFINKTVHFKIGKQLIRTLQTNPFVIQLNCHLFQGCKKKCSQALSLMVRLDD

SEQ ID NO: 354 - protein, 38 aa, Streptococcus pneumoniae
MEIVLVSFSISFQHFIIAYCLDFSSAGFRNSQNFSNFC

SEQ ID NO: 355 - protein, 240 aa, Streptococcus pneumoniae
LNFNHVYFGYDENRPVLKDITCSIFKGQKIAFVGPSGSGKSTIVRLLERFYKPLSGDILMEQSSIYDFNLKEWRSKIAWVSQNNAVLSGSIRDNLCLGLNRLVTDDELMKVLDLVSLGDEIRSMKEGLDTEVGERGRFLSGGQSQRLQIARTYLKDAEILIFDEATANLDADSEYAIISSLYSVLKEKTVVIIAHSLSTVKDVDCIFFLEEGKITGSGTHKELLENHERYARFVQEQMIE

SEQ ID NO: 356 - protein, 207 aa, Streptococcus pneumoniae
LIYAEKSFFDKSQSGELTSAIVNDMSVIREFLITTFPNIILSLVMVLGSIVVLFSLDWNLSLLLFITLPCMMFIILPLSNISEKYSRRLQKEIGFLTGQLTEKIQEHELIKTNQAEKSVQNVLDNCIERVQNNSLKSDRVTSFETPFALLFIFATIAVMLTYGSYRVSAGYISVGTLVSFLIYLFQLLNPISNIANFVTVYSRSKGS

SEQ ID NO: 357 - protein, 86 aa, Streptococcus pneumoniae
MKLKLLRVDTKVIMGSFFLVLSSLLALLLPLILKGLIDGSSIENIGSKVFQSFLIFIGQALFSSIGYYLFSQSGEKKIAKIRKKVI

SEQ ID NO: 358 - protein, 198 aa, Streptococcus pneumoniae
LIRYLDQYEDVILREIKAQFPDVAVDKLMEEYIKAGLILRENKRYYLNFPTLESLDSLELDQEIFVREASPVYQALLEQSFETELRNQINAAILVEKTDFARIKMTLSNYFYKVKQQYPLTEKQQELYDILGDVNPEYALKYMTAFLLKFLKKDHLMQKCRDIFVDSLVVLGYIVQNEDRKYELAIDFDKERLTFYLA

SEQ ID NO: 359 - protein, 46 aa, Streptococcus pneumoniae
MIGLKEVCRFLTDNTSLSTSMINHPIQINGNMAIVTCGSLDGLSHV

SEQ ID NO: 360 - protein, 43 aa, Streptococcus pneumoniae
MLINDLTFFIFDISPIQSYKKVRLEITNLWNNTKNATSRGDSC

SEQ ID NO: 361 - protein, 55 aa, Streptococcus pneumoniae
MRERVRLSGSLFTSLKTREHIKSTMELFHKYVFFLIQEIKIKMINFLKIGDLPTL

SEQ ID NO: 362 - protein, 121 aa, Streptococcus pneumoniae
MIDHFEIKVKDLQISEGFYRSFLAPLDYKLTFKTSSLISFLSPNSPHPGGDFWLTQGTQDPVHFAFLAENKEEVQACYEAGLEAGGRDNGVPGYRSEHPIYYAAFMIDLDGNNIEVVCHKE

SEQ ID NO: 363 - protein, 58 aa, Streptococcus pneumoniae
VIVFLSRNKDGNAFCHLDLISIANPVWGWDDDFITWIDHSHKEGIERIFGSRSDCHLI

SEQ ID NO: 364 - protein, 40 aa, Streptococcus pneumoniae
LSNQFYFSLQTKPILKVKQFLLFQSQMTRVSEILQFSNKL

SEQ ID NO: 365 - protein, 72 aa, Streptococcus pneumoniae
LFRLGQLISLNVAVHKPIKKFQGWIVLSSLPFQSLDILKFFRRFLSRYLVETLQLTGRIESQGIKHGLTFWF

SEQ ID NO: 366 - protein, 59 aa, Streptococcus pneumoniae
MEDKEMGFYLMVASMLLGLLALKIGFSQFKEKKDKFLSILTSLAGTALVLVAVWLGWPK

SEQ ID NO: 367 - protein, 54 aa, Streptococcus pneumoniae
MLDSDIGCSRKNLLGLFWIRRRRNIHIVDRAMEKGISNRAPNKISLKACFFNFF

SEQ ID NO: 368 - protein, 86 aa, Streptococcus pneumoniae
LLHPFTRNITCDRHILTLLGNLVNFIHIDNATLCTFDVKVSNLQEFEEDIFHVLTHITSLRQSCRIRNSKRYIQALSQGLGKESFP

SEQ ID NO: 369 - protein, 85 aa, Streptococcus pneumoniae
VEIDAFVVVINRHCQGTLGTILTNYIVVQDMEEFNWFWHLRQVCQDFLNQFFSNDFLSQLHAFITNKSIVASNYFLYFFLVFATK

SEQ ID NO: 370 - protein, 40 aa, Streptococcus pneumoniae
  misc_feature 3...4: Xaa is any amino acid
MNXXGKGEEGEDLVVGVFKWLYSERLRFDTERVGGGGKGK

SEQ ID NO: 371 - protein, 166 aa, Streptococcus pneumoniae
MHKNFVVVVTNFFTAVQFIQFNKEGTTCHNTTKFFNHLDSCLNSSTCRQKVIYNKNTLTWLNGIRVHSQGIDTVLFFIVSRNNFAWQFTWLTNRRKTNSQLKGNWTTHDKSTSFRSHDHVDFLVSSILNDFTNSVAISISISHQRTNITEGNAFLWIIFNCCNVIF

SEQ ID NO: 372 - protein, 62 aa, Streptococcus pneumoniae
MLNRQVCFCFVNHISPLNVVIWENLSLEELLYAICICFITHKIAKQTSLTIDNAGIAMNNIR

SEQ ID NO: 373 - protein, 58 aa, Streptococcus pneumoniae
LDSRFFCTDFFKGRQAKGCSFSCTSLSLTDNILAFKGQRNSLFLDRTSFYKTSFFNFC

SEQ ID NO: 374 - protein, 40 aa, Streptococcus pneumoniae; identical to SEQ ID NO: 180

SEQ ID NO: 375 - protein, 49 aa, Streptococcus pneumoniae
MRFLADQDRIQHHRYSWALFDKVQGLLSHTDSREKTNLNSPKFHITQAI

SEQ ID NO: 376 - protein, 54 aa, Streptococcus pneumoniae
MLKNGIISWKDFKSFFCQGCQTSHCYKPMQVVQGIGSQISRQSTTTKNIISRKC

SEQ ID NO: 377 - protein, 89 aa, Streptococcus pneumoniae
VTAHRIFGTSSIHSKLIGLAMLGITAMKIICHKLNRNHINIFRRLGIQGKTEFLLIHLIRQVKMNDLSQGMNPTICPTSTVNSNDLPFI

SEQ ID NO: 378 - protein, 38 aa, Streptococcus pneumoniae
MLARSKNCFMKSLSIFLLIFYFFDSYQISKKRRSLIGL

SEQ ID NO: 379 - protein, 45 aa, Streptococcus pneumoniae
LEVCIHHHHQISCRILQACIKGCFFAKISRERNIMDCRILLPIGL

SEQ ID NO: 380 - protein, 53 aa, Streptococcus pneumoniae
LTGNVICHPKLPDKISVKCLYSSKIQFKPRQRRLAMGMVTDFVSSIHNLKAAL

SEQ ID NO: 381 - protein, 55 aa, Streptococcus pneumoniae
MGRKPKKRPEERTELERLQAENEYLRAENAILKKLRELRLKEEKEKEERQKLFKN

SEQ ID NO: 382 - protein, 573 aa, Streptococcus pneumoniae
MDEIKNFRQWGSKTPGHPEVTHTSGVDATSGPLGQGISTAVGFAQAERFLAAKYNKDGFPIFDHYTYVIAGDGDFMEGVSAEAASYAGHQALDKLIVLYDSNDICLDGETKDTFSENVRARYDAYGWHTVLVEDGTDLAAISTAIETAKFSGKPSLIEVKTVIGYGSPNKSGTNAVHGAPLGAEETGATRKFLGWDYDPFEVPEEVYSDFKTNVADRGQEAYDAWASLVSDYKVAYPEVASEIDAIVAGKSPVTITEKDFPVYENGFSQATRNSSQDAINTAAVLPTFLGGSADLAHSNMTYIKADGLQDKYNPLNRNIQFGVREFVMGTILNGMALHGGLRVYGGTFFVFSDYVKAAIRLSAIQELPVTYVFTHDSIAVGEDGPTHEPVEHLAGLRSMPNLTVIRPADARETQATWHHALTSTTTPTVIVLTRQNLVVEEGTDFGKVAKGAYVVYDTPGFDTIIIATGSEVNLAIKAAKELVLQGGKVRVVSMPSTELFDAQDATYKEDILPSKTRRRVAIEMAATQSWYKYVGLDGAVIGIDIFGASAPAQTVIDNYGFTVENIVAQVKSL

SEQ ID NO: 383 - protein, 49 aa, Streptococcus pneumoniae
LNFLNEPRRQGNIGNKMAIHNIDMIRCYFIIQKSNLLFEFVQIHGHQRW

SEQ ID NO: 384 - protein, 53 aa, Streptococcus pneumoniae
VIYSYDYPRLLHSRTLAMGNSNIIPNTGLSFCLSLIKTFDKLVSIRHITRLNQ

SEQ ID NO: 385 - protein, 487 aa, Streptococcus pneumoniae
VSRKQEQMETLLLLLRDSKDYISAKVLGEKLNCSDKTVYRLVKGINKDCPVEAFILSEKGRGFKLNPRSSLVDVDGNFTEAFDPEVRREKLLERLLLTAPKPHSIYDLGEEFYVSESVVLKDRQILQESLAIYGLDLKMRQRKLFIDGDEAQIRSAILNLLPMFNQLDLEQITQNKVQPLDGELAHFCLGLLITLERELGVNIPYPYNINIFSHLYIFISRNRRSTSIHVVAPSKPTIVDEKIYSVCQKIIQEIEQYFRMKVDAVEIDYLYQYVVSSRLQKPFSSGKLPFSQRVLDVTHYYFSRMCMDNREIETTDPDFVDLASHISPLLRRLDNRVQIKNSLLSQILLTYPNLVKELTTISKEVSLVFGFASLSLDEIGFLVLYFARFQEKRARPLKTVVMCTSGVGTSELLRARLEKQFSELDIIDVVAYHQLDELINLYPDLDFIVTTVALQEPASVPFVLVSAFLTEGDKQRLQAKIQEINYE

SEQ ID NO: 386 - protein, 61 aa, Streptococcus pneumoniae
MMSMVDPIDQTFIVNLKIRKSQVFSQLQFSCHIVVYPSEVHIYQALVIKLQNHILGPQVLP

SEQ ID NO: 387 - protein, 85 aa, Streptococcus pneumoniae
LANRTRIDNQLPTSPVTKQLLVNMSINSNITGRMSHQAVKLLLFASMNQLSPPVLIRQMMANSHRQIPKLTMNLKRLIVEHFNFF

SEQ ID NO: 388 - protein, 39 aa, Streptococcus pneumoniae
MDSIEFFHDKTFLFYLTSFYSKRMGVTTKMIKIAEGRFS

SEQ ID NO: 389 - protein, 80 aa, Streptococcus pneumoniae
LTRFEEIFEEYKNPQDTFFYPLVYKENTYKKTAISIFALLMLGVCCLFLFSQQSYKKLVQYYANDQNLPSRITYSEYSDK

SEQ ID NO: 390 - protein, 282 aa, Streptococcus pneumoniae
MIAEFIDGLQKFHFLQNALITAIVVGIVAGAVGCFIILRGMSLMGDAISHAVLPGVALSFILGLDFFIGAIVFGLLAAIIITYIKGNSIIKSDTAIGITFSSFLALGIILIGVAKSSTDLFHILFGNILAVQDTDMFITMGVGAAILLLIWIFFKQLLITSFDELLAKAMGMPVNFYHYLLMVLLTLVSVTAMQSVGTILIVAMLITPAATAYLYANSLKSMIFLSSTFGATASVLGLFIGYSFNVAAGSSIVLTAASFFLISFFIAPKQRYLKLKNKHLLK

SEQ ID NO: 391 - protein, 71 aa, Streptococcus pneumoniae
LNQEIIWKTRKSFTFKSRSLTDIRSRRKCLTNIQLSLIVRHLRQSRTLLAELNVNIPKRQIGPILTRFWPN

SEQ ID NO: 392 - protein, 83 aa, Streptococcus pneumoniae
MQGEMRFSLVQFLTTLIKFCIFPFLLPNWLFGRKACTHWEFSFPKIKGVFEFHGISFINNNKLKTTTSKKDENRGTTFIRKKI

SEQ ID NO: 393 - protein, 38 aa, Streptococcus pneumoniae
MYEEPEVAPVHPTGPTPATETVDSIPGFEAPQESVTIL

SEQ ID NO: 394 - protein, 42 aa, Streptococcus pneumoniae
MRLSWHFMRFKKLPLLINQTILDVGSTDINCNVICHKYLLLD

SEQ ID NO: 395 - protein, 79 aa, Streptococcus pneumoniae
MGNNGQFTFGYRHDFFQNQLAIFNALVDTFTRRTIDIKTLNTFINEVLNQGTRTFWAYFSLIIITCVEGWNDTFVFFQI

SEQ ID NO: 396 - protein, 40 aa, Streptococcus pneumoniae
LSTRNKYCKNLIIFESTFNILDIVKKDLKLNSKLEKDLKY

SEQ ID NO: 397 - protein, 1020 aa, Streptococcus pneumoniae
MNRSVQERKCRYSIRKLSVGAVSMIVGAVVFGTSPVLAQEGASEQPLANETQLSGESSTLTDTEKSQPSSETELSGNKQEQERKDKQEEKIPRDYYARDLENVETVIEKEDVETNASNGQRVDLSSELDKLKKLENATVHMEFKPDAKAPAFYNLFSVSSATKKDEYFTMAVYNNTATLEGRGSDGKQFYNNYNDAPLKVKPGQWNSVTFTVEKPTAELPKGRVRLYVNGVLSRTSLRSGNFIKDMPDVTHVQIGATKRANNTVWGSNLQIRNLTVYNRALTPEEVQKRSQLFKRSDLEKKLPEGAALTEKTDIFESGRNGKPNKDGIKSYRIPALLKTDKGTLIAGADERRLHSSDWGDIGMVIRRSEDNGKTWGDRVTITNLRDNPKASDPSIGSPVNIDMVLVQDPETKRIFSIYDMFPEGKGIFGMSSQKEEAYKKIDGKTYQILYREGEKGAYTIRENGTVYTPDGKATDYRVVVDPVKPAYSDKGDLYKGNQLLGNIYFTTNKTSPFRIAKDSYLWMSYSDDDGKTWSAPQDITPMVKADWMKFLGVGPGTGIVLRNGPHKGRILIPVYTTNNVSHLNGSQSSRIIYSDDHGKTWHAGEAVNDNRQVDGQKIHSSTMNNRRAQNTESTVVQLNNGDVKLFMRGLTGDLQVATSKDGGVTWEKDIKRYPQVKDVYVQMSAIHTMHEGKEYIILSNAGGPKRENGMVHLARVEENGELTWLKHNPIQKGEFAYNSLQELGNGEYGILYEHTEKGQNAYTLSFRKFNWDFLSKDLISPTEAKVKRTREMGKGVIGLEFDSEVLVNKAPTLQLANGKTARFMTQYDTKTLLFTVDSEDMGQKVTGLAEGAIESMHNLPVSVAGTKLSNGMNGSEAAVHEVPEYTGPLGTSGEEPAPTVEKPEYTGPLGTSGEEPAPTVEKPEYTGPLGTAGEEAAPTVEKPEFTGGVNGTEPAVHEIAEYKGSDSLVTLTTKEDYTYKAPLAQQALPETGNKESDLLASLGLTAFFLGLFTLGKKREQ

SEQ ID NO: 398 - protein, 46 aa, Streptococcus pneumoniae
VDRTDEVSSKHCFEVVDRTDEVSSKHRFEVADRTDEVSNIYTARQS

SEQ ID NO: 399 - protein, 43 aa, Streptococcus pneumoniae
MSCNCAFYRSQFFDVNSVSNYHSHQKELRFPNSILFTYFVKVT

SEQ ID NO: 400 - protein, 92 aa, Streptococcus pneumoniae
VGLIKLTSYVFVCISNSFLTRHDKNDNICFFHGNFCLVLDLFHERSIDIINSSCINHAKRTIEPLTRCINTVTCHSFDIFYNGDSLTSDPIK

SEQ ID NO: 401 - protein, 78 aa, Streptococcus pneumoniae
LSSKSCIDRTNQETFHTLGLEGVGMKSGSLFCSVQISDKEKENSRLANGFLRYQFIQGIFLLLTSYHNHRVGLEILPR

SEQ ID NO: 402 - protein, 63 aa, Streptococcus pneumoniae
MKSKEQTRKLAVGCSKYSFEVADKTDEVSSKHCFEVVDRTDEVSNYIYGKAKLTWFEEIFEEY

SEQ ID NO: 403 - protein, 39 aa, Streptococcus pneumoniae
LSNSFFLIKFSSSKISGKKRIVSDNIFIRNKFICHFKKE

SEQ ID NO: 404 - protein, 645 aa, Streptococcus pneumoniae
MDYSKVAAEVIEAVGKDNLVAAAHCATRLRLVLKDEAKVNQAALDNNADVKGTFSTNGQYQIIIGPGDVNFVYAEIIKKTGLKEVSTDDLKEIANKDKKFNPLMDLIKLLSDIFVPIIPALVAGGLLMALRNFLTSPDLFGPQSIEDMYPAIKGFSAMIQLMSAAPFMFLPVLVGISAAKRFGANQFLGAAIGMIMTTPDLGGKEAFWDILGFHVTQTNYAYQVIPVLVAVWLLANLEKFFHKKLPSAVDFTFTPLLSVMITGFLTFTVIGPVMLVVSDAITNAIVWLYNTTGAFGMGLFGGTYSLIVMTGLHQSFPAIETQLLSAYNNNGTGFGDYIFVVASMANVAQGAATLAVYFLTKNAKTKGLSSSAAVSAFLGITEPALFGVNLKYKFPFFCALAGSAIGAFVAGLTHVIAVSLGAAGFIGFLSIKAGSIPMYIIAEIMSFVAAFAFTYFYGKTKAASVFADEAATATAETVTEPTVEAPVVEETDTLQNETLVTPIVGDVVALADVNDPVFSSGAMGQGIAVKPSQGVVYAPADAEVSIAFPTGHAFGLKTRNGAEVLIHVGIDTVSMNGDGFEAKVAQGNKVKAGDVLGTFDSNKIAAAGLDDTTMVIVTNTADYASVAPVATGSVAKGNAVIEVKI

SEQ ID NO: 405 - protein, 142 aa, Streptococcus pneumoniae
MTESYTWVEADRATLSRYRHGQGHLTDQFFSFKVQRPAAKTLIASISTGKGMGPSFDGTPVITSGNQNRINTIKNSFIMSSSSVRISLRKLTSQRNFLRNLSSLILLAAQVAKGDATACSHQRIGRVVGQDSHETLSLTEFF

SEQ ID NO: 406 - protein, 50 aa, Streptococcus pneumoniae
MNINNEKVWFAFYLLDMQITRPTSTFNDRRIGLIGKLQELRFLAGNLLLR

SEQ ID NO: 407 - protein, 57 aa, Streptococcus pneumoniae
LIKGYLPNHLSLMDLCSKTTCTLDDFAGIAGRRNHRGFFCHIGNGVFLTVDKYLWNQ

SEQ ID NO: 408 - protein, 38 aa, Streptococcus pneumoniae
LIKLTGRNFSDILIKCLVKCFTNLLSNQLMLLPSTLKL

SEQ ID NO: 409 - protein, 69 aa, Streptococcus pneumoniae
MIQSENHCSASHSNRDYQSQHDNQGRTCQCFIIVPCHKKGSCSVGEITWNQRCQNGQDKDHSRCLIKNT

SEQ ID NO: 410 - protein, 58 aa, Streptococcus pneumoniae
MIARQLMVFFSTNQADTRITNMSIDSLIINNSKDFQSSSHASVSFILTKLVNLLIFNF

SEQ ID NO: 411 - protein, 42 aa, Streptococcus pneumoniae
MGEPFTHFIDCIDLGINPSYTQVCHRHFTSDIPCAMTSHPIS

SEQ ID NO: 412 - protein, 70 aa, Streptococcus pneumoniae
LSSDSHFIGIKAFVILILGKSNSIVLRIVGLYQDLTCLFSTTCSTCHLSQELEGSLRRTEIRQIQGRIRI

SEQ ID NO: 413 - protein, 56 aa, Streptococcus pneumoniae
MAVHSLGIHMQGQRNIAVGTSIHRPTLPTHDKARITTAIEHENHLLFFNQTVLDSL

SEQ ID NO: 414 - protein, 56 aa, Streptococcus pneumoniae
MVTGIAVLLISRFMLFINNHDTQIFQRSKDSRSGTNNNLGIATLHLAPFIILFTIG

SEQ ID NO: 415 - protein, 56 aa, Streptococcus pneumoniae
VKNGYLVPKTCYKTLGHLRSQGNLRYQQNSCLALIQGTLDNLQVNLGLPTSCNPLK

SEQ ID NO: 416 - protein, 39 aa, Streptococcus pneumoniae
MVNLIPRLGLDLLLIDCLIFQTKQAFSSQTHHFSLLGKV

SEQ ID NO: 417 - protein, 55 aa, Streptococcus pneumoniae
LGLQTKNNPLNQAITLTKRHMNPHPNFQHSLKFLRNPVTIGLVRLHQGHIYDNLS

SEQ ID NO: 418 - protein, 134 aa, Streptococcus pneumoniae
LGNHFCTICSTTYQAFLQFIQIWWCQEDKDSIWNLFLDLKSTLNFNFKENIDSLVQGFIDIGQRSSIVVADIFCVFQHLSLTNQLFKFFTSTEEIVNTVHFSRTLCACRHRYRILKLVFRTLKNLSSNRSFSNP

SEQ ID NO: 419 - protein, 54 aa, Streptococcus pneumoniae
VLLPNVLIKFINRFCWNVIPIKGCDSTFWNNKLIAIFKGNLDRGIHTIFCLHTT

SEQ ID NO: 420 - protein, 59 aa, Streptococcus pneumoniae
VGCSYICHELVTNHDHFLFVIVEFLHSTVNTKCEGLQGPVNVINPKFLNCSLNAFFGVI

SEQ ID NO: 421 - protein, 58 aa, Streptococcus pneumoniae
LLHLWRSIRVVPSNEGIIQIDQNSLDSLRLQAGDCQIIDCFHSKIWYIIFNRHSGSFS

SEQ ID NO: 422 - protein, 111 aa, Streptococcus pneumoniae
  misc_feature 106...107: Xaa is any amino acid
LFGSCRQINHTSLQIRQGKEVFLGSSLAQEVIDLIPTLVHLLNDRIVGIADDFQTGKEKLINRKRVMALQITSHLFNDIGVLGITNGNQATMLDNKGHGKSLIVGXXHSIH

SEQ ID NO: 423 - protein, 78 aa, Streptococcus pneumoniae
VKGLLLATKLCRTNSHTDNLTRYSNRSICQNDLISHIQLTFKEDEKAIDDIRQKALGSHTNRYPSNTSSSQQTRNWQT

SEQ ID NO: 424 - protein, 62 aa, Streptococcus pneumoniae
LWGILGLTLPNLSGIGLLGDLFVGGLKAVAPILVFALVANALSQHQKGQDSNMKTVVFLYIL

SEQ ID NO: 425 - protein, 345 aa, Streptococcus pneumoniae
MIGTFAAALVAVLASFIVPIEITLNSANTEIAPPDGIGQVLSNLLLKLVDNPVNALLTANYIRILSWAVIFGIAMREASKNSKELLKTIADVTSKIVEWIINLAPFGILGLVFKTISDKGVGSLANYGILLVLLVTTMLFVAPVVNPLIAFFFMRRNPYPLVWNCLRVSGVTAFFTRSSTTNIPVNMKLCHDLGLNPDTYSVSIPLGSTINMAGVAITINLLTLVTVNTLGIPVDFATAFVLSVVAAISACGASGGASGIAGGSLLLIPVAGSLFGISNDIAIQIVGVGFVIGVIQDSCETALNSSTDVLFTAVAEYAATRKKASLLMSCLLRFYSNLLGNSYVY

SEQ ID NO: 426 - protein, 38 aa, Streptococcus pneumoniae
MIAHAIIILLFKNAGKLCFLVVFFFTVHTFGKNQLLLG

SEQ ID NO: 427 - protein, 55 aa, Streptococcus pneumoniae
VFEVVDKTDEVSSKHCFEVADRTDEVSNHTYGKVKLTWFEEIFEEYHTKKPCSSR

SEQ ID NO: 428 - protein, 82 aa, Streptococcus pneumoniae
MKNRIIDVFEVVNRILVITVENPDFEDLRVNQFVKIGDKKYRVRSGPMIHSTPPQSVLDRDTFTIDYTDDELLDKEAVFTTH

SEQ ID NO: 429 - protein, 375 aa, Streptococcus pneumoniae
MAYIEYKQRGKKRLWSFSIRERSKSLLHKSGFKTKREAKIEAEKVLHKLNTGSVLSSSMTLSELYNEWLDLKILPSNRSVVTKKKYLMRKKVIERLFGNKPVSQIKPSEYQKIMNEYGETVSRNFLGRLNSSIQASIQMAIADKVIIEDFTAYVELFSSKSGQKVEEKYLHTESDYQKVLVYLKNKFDYQKSIVPYVIYFLFKTGMRFSELIALTWDEVDELNEQLKTYRRYNTAIHKFTPPKNNTSIRLVPITSDMLSLLKTLKILQLKTNKELNIDNENNLIFQHFGYVYDVPDIATVNKAIKVMLKELQIFPLITTKGARHTYGSYLWHNNIDLGVIAKILGHKDISMLIDVYGHTLEEKISEEFTAVKSLL

SEQ ID NO: 430 - protein, 60 aa, Streptococcus pneumoniae
MKDTISNKDLISMGYRPSTANAIIHQVRELLVSRGYTFYNRKRLMVVPKSVVKELLGMEL

SEQ ID NO: 431 - protein, 347 aa, Streptococcus pneumoniae
MNKEVLNRAPSNSPITIHQMSNKSYSKFQEEVSLKYGFIGLKLDKLSLTAEVSEEFHSEILSGNFTLYDYFGVVEPNLNRNGELASYKGQFFNDEKENWYIEYTPVASIKMNKRPLKIEFTPSKVSKKNFLIVFHRMFPYMFNIAISTFHLAYDFERDLSALRVNWPKVMYRPIYKGMKLETMDFGAPKGNYHLTAYNKLKERMDSGDMAEIEIYQQYDNLWRIEYKFYNEGNIKKELKNGLPFLAKIPVYIENFKGLEFNNLGVNEKIYLFALRNKPELFAESDKRTVAKYKKLAESISEVNLNVFFQNALDFVEIFNQEPCLINFFEFMNSMLQGDIPKLTINQE

SEQ ID NO: 432 - protein, 55 aa, Streptococcus pneumoniae
MHFDKSKFGAVFSAPGLYEVEVINNASFGQNAQYEVIQSRKLGTFAELIEMAKIK

SEQ ID NO: 433 - protein, 438 aa, Streptococcus pneumoniae
MFKIKQTASLSEHYFLNTSKLRSIRWFTIGFLSILSLYSCILFKGWFLQMFTLSVGLIVTLYFERKIKGCFHQIEPLLIVRENLLFMLRRNSFLFTATKDGAILRSAKFNYQLNDVSIVIQALKSGDEFTREMDDLDVLLSSVLGISLSYKEIYATHVEYVFVYRQPERLHITSLPLEEDNSLKIKIYDDFIIDLRKNFSMLISGASGAGKSFFTYYYLTRFISQTVNGRHAKIYVIDPKLSDIYKLSKFSGLPVENYGTTNEDAFRIVRHYINEMNRRMEIYNKSDLFDSIGIDLGLPPLLLVIEEYSSLVASMDSKAKKDFENMVAIVAQKARSLSMGVCIVMQQPRSDSLSTNIREQLVNAIFLGAPTRESSQMMFGTTDVPKVKKDKGVGLYSTDREPPKEFHSPMFDRDVFEVILPVWEWAAKDYMKDEDEDV

SEQ ID NO: 434 - protein, 183 aa, Streptococcus pneumoniae
MKQKQPIVSRTKQHTFEELIQDQKLERLANLSPDLVGRYGFTASCASSFANLIKEAYGGKNLNVVYASRMLALWNIACSCYHKADGYSLADALFSDKKICLDYFYYHNNTSDIITLDMIEDVKKNYLQLVTTATSDNMSVIEFEMEKESDLYYFIKATLGSSFSRMHYSVLVKALAGALAKNI

SEQ ID NO: 435 - protein, 39 aa, Streptococcus pneumoniae
MGWKGTPPCLHPSNQDTTILIVQQCLRRIEVLAMINFLN

SEQ ID NO: 436 - protein, 49 aa, Streptococcus pneumoniae
VFGSYYGVIASIFFKEFWITEISSNQLIWQVCSSYNWILGNLFKVNPVI

SEQ ID NO: 437 - protein, 50 aa, Streptococcus pneumoniae
VLPSHQVLTFSMSPVHRPPNTIIWIELIKEMVFSTKIDKSIWIIDPTNLS

SEQ ID NO: 438 - protein, 95 aa, Streptococcus pneumoniae
LIVSLKTKSRKAKDMAESIQGWLAQFLVNLFKSITFDCGKEFSKWKDISNHHDSESFFANLGCPRQRCLNEHSNRLLRCHDLPKQTDFNEVSQEF

SEQ ID NO: 439 - protein, 256 aa, Streptococcus pneumoniae
VVEIIYFLIIIIASGLGSISGMGGGIIIKPLMDSFGYHSVSDIAFYSSFSVFIMAIISTTKRFSQSKEIKWRLIFTVSFSSVLGGFLGHLIFQVLLSQLSVRLVSIVQMILLFVMLLVSFVLTDFKKTYQFDKIGFYMICGLLLGLISSFLGIGGGPLNVSLLMVFFSISIKEATMYSLAIIFFSQLSHLATIVVVTGLNQYHLAPVPVIFLASICGGVLGTVVSKVLPENWVRYCFKGMLFFVMGMTLYNLFHIL

SEQ ID NO: 440 - protein, 271 aa, Streptococcus pneumoniae
MMGTNSEEGFLDDFEGPQVAVSVKDFSIADTPVTNQEFAQFVKETGYKTLAERQEWSFVFILFVPEAEREGYPHPAGAPWWLQVSNACWKHPYGENSNLVGLEDHPVVHVALEDALAFCNWSGMSLPTEAQWEYAARGGRQSEYPWGDTLLEGGYYHANTWQGRFPYENTALDGFIGTAPVYEFLPNDFGLYQMIGNVWEWCRNPRYTLLASFNEDDYELPKYGIQDEEYAIRGGSFLCHCSYCNRYRVAARNGCISTSTSSHLGFRCLKE

SEQ ID NO: 441 - protein, 491 aa, Streptococcus pneumoniae
MVQTKQPNIILIVVDQMRADALSLNSKDKLVSTPTLDMMASVGYNFENAYSPVPSCVPARAALLTGLDQDKSGRVGYQDEVPWNFTNTLPKVFKDMGYQTECIGKMHVFPSRQRLGFDHVLLHDGYLHVDRKYDKTYGSQFDYASDYLAFLKGKVGYDVDLIDDGMDCNSWEARPWDKDEKLHPTNWVVSESISFLQRRDPTVPFFLKMSFEKPHAPLNPPKYYFDMYMERLPQFLDLHIGNWEVLEKQIPSIYALRGKLKEDDQRRMVAAYFGLITHIDHQISRFLTALKEFRHDKDTIIWFVSDHGDQLGEHYLFRKGYPYQGSIHIPSFIYDPAGLIAGNRGTIKQLVKIQDIFPSLVDLAGGTTTDELDGRSVKNLLFGQYEGWRTEFHGEHALGKDSSQYILTDQWKFIWFPVLNHYQLFDMKKDPHEMNDLYPSEKYQPIVRQMKKKLVDFLRYREEGFVVDEELVPVELSKITPTLTKTGDSQS

SEQ ID NO: 442 - protein, 451 aa, Streptococcus pneumoniae
MNTMLDKMQEKLSPIAMKVGNQKFLVALRDSFVGTMPVIMTGSIALLLNAFLVDLPQQFHLESITKTFQWLVDINNLVFKGSIPIVSLLFIYCLGVNIAKIYKVDTVSAGLVSLASFVISIGSTVTKSFPLANVGDVKLDQILQGIDNLAFDGKNLMVTIGNVIPGNHINARGYFTAMMIGFLASIIFCKVMKKNWVIKLPDSVPPAIAKPFTSIIPGFMAMYIVAILTYVFHLLSNDLLIDWVYKVLQTPLLGLSQSFFAVILMIFLNKLFWFFGLHGGNVLAPIMEGLFGVAMLANLDAFQKGEPIPYIWTSGSFGAFVWFGGLGLVLAILIFSRNSHYRKVAKLGLAPVLFNIGEPVNYGLPVVLNPLLFIPFVLSPVFMATVAYWATSWGLVSPVTQNVTWVMPPILYGFFSTAFDWRAIILSVVCLIISVLTYFPFVKMADKTELS

SEQ ID NO: 443 - protein, 105 aa, Streptococcus pneumoniae
MDESNLESVMGLIMYGGEAKSNAMEAIQAAKKGDFSKANRRLADANAALLQAHKAQTEMLTREAQGEETSISLLMVHAQDHLMTSLTFVDLAKEVVEVYERFEKN

SEQ ID NO: 444 - protein, 105 aa, Streptococcus pneumoniae
MAKVTIMLACAAGMSTSLLVTKMQKAAEDKGLDAEIFAVPAPEAEEIVATKEVNVLLLGPQVRYLLGDFQEKLKDRQIPVAVIPMTDYGMMNGSKVLDLAESLLD

SEQ ID NO: 445 - protein, 298 aa, Streptococcus pneumoniae
MKRLISANPSEILQMNAEELKQSILASEGRVVLSENVVTRETFVGDITNSEIARAFGADMILLNCVDVFEPKIYALDSSGDDVIHRLHQLVACPIGVNLEPIDPSAKMLEETQEIVAGRVASVETLKRIEELGFDFVCLTGNPGTGVSNREIIKAVQTAKENFSGLIIAGKMHGAGVNEPVAELSVAEQLLEAGADVILVPAVGTVPAFHDQELREVVDLVHSKGGLVLSAIGTSQETSDTDTIKEIALRNKICGVDIQHIGDAGYGGLATVDNIYALSKAIRGVRHTVSRLARSVNR

SEQ ID NO: 446 - protein, 420 aa, Streptococcus pneumoniae
MEKLLQEKLLPVAARLGNNKALVSIRDGITLTIPLLLIGSLLMVIASFPIPGWEKYLGDIGVADYLWKGVDSSFGLLGLVASFGIAYFMARQYKVDGIPAGIVSLSSFITVTPFITGEAGAGMPTAFMASKGLFVAMILGLINGYIYQWFINHNIQIKMPDGVPPAVSKSFSAIIPGAVTIVGWLIVYATLDKLSLPNLHEIAQVALGGPLGLLGNNVIGLLILIFLNSSFWFVGLHGGNVVNAVMKPLWLANLDANKVAYQTGETLPNIFTSVFMDNFVFIGGGGATIGLVLALGYLAHKKKASKQLKTLAPITVIPGLFNINEPAMFGVPIVLNILLLVPFILAPMFNLLVAWGAMASGLVPLTYTDPGWTMPPVISGLLATGSISGSLLQIVLIVLDVLLYLPFVIAIEKRFKLLED

SEQ ID NO: 447 - protein, 392 aa, Streptococcus pneumoniae
MTLSKKQLQLRAKILETVYTLGPISRIEIATKTGITPATTSSITNDLIKENILLELGEDEHDTSVGRKKILLDIQAKRFYYIGCELSEKHFTFALGDNLGNILKEEKEIVTKQLIQEKGNQLINQTLKQFLNNCSDYEIEAIGIALPGRYLDDYKITTNNPLWQHIDLEMIQSHFDKPLFFSNNVNCMAIGKRLFSRQQNDTNFAYFHFARGMHCSYIYDGNIYGKGNLMIGEIGHTVVSSEGEECSCGRKGCLQTFAGEAWLIKKSKILYHQSPYSLLPSLVKNADDIDIQVILTAYQLGDTGIITLIHQALLYLSQTILNISMMIDSQKIYLHSPLLTNQHIIQKLYSEMNYKPKLLYNRLPEVIIEPYNDFTAAHSAIALCLYHTILHS

SEQ ID NO: 448 - protein, 84 aa, Streptococcus pneumoniae
MPFKENLICQHRNHHCSVFFISLGLLHNIHIEIDISQTRASFLDLSDYLQAVLMILQKFCQAIGLAQRLDLLQLHLLHLTRLLL

SEQ ID NO: 449 - protein, 55 aa, Streptococcus pneumoniae
MYLLLLVVKDHIALIDKEMHVWRPNCILRDLTNFFIKRNHIVTNKTNGSPTKREV

SEQ ID NO: 450 - protein, 40 aa, Streptococcus pneumoniae
MVLALMNHFIKEIQGIPINRLTILIENSIFKLNLKNWIIG

SEQ ID NO: 451 - protein, 83 aa, Streptococcus pneumoniae
MKIKEQTRKLAAGCSKHCFEVVDRTDEVSSKHCFEVADRTDEVSSKHCFEVADRTDEVSNHTYGKATLTRFEEIFEEYKGVPR

SEQ ID NO: 452 - protein, 37 aa, Streptococcus pneumoniae
LVEQLTFNQWVTGSSPVRVIYAGLAELADAPDLGSGA

SEQ ID NO: 453 - protein, 37 aa, Streptococcus pneumoniae
VCQRMDARTCKTTIIAVHNVLTALQQTWIAVQLYQTK

SEQ ID NO: 454 - protein, 49 aa, Streptococcus pneumoniae
LHLGKSILSLPVKGKDLEFLVHLFVINHWIGFPSRTSTFCRCKVLNGME

SEQ ID NO: 455 - protein, 56 aa, Streptococcus pneumoniae
LEQTVIIANNPCELYWDNHLSFLSDSLLKQVIVHLKRICLDIHHDRGCSHVRNDTT

SEQ ID NO: 456 - protein, 137 aa, Streptococcus pneumoniae
LTDDGVLILVVDAGWRGNSCLQEQGCHHFRAILLCITWHFRSCTDKGHLTFKDIDQLRQFVQTDTSDEISNLGNTAIVSRSHQTSFFIRIRHHGTKLPNLEPTVVLGHTLLLVNHWPLAIQLDPNAQDEKDGRGQNQ

SEQ ID NO: 457 - protein, 37 aa, Streptococcus pneumoniae
MLKMRKMGEVRTSKIKAKTQSKQRLKISEPFLLETSW

SEQ ID NO: 458 - protein, 47 aa, Streptococcus pneumoniae
MDYNAVIPEFLVSNIEQSRSFYCGLLGFRIEYQRPEENFLFLLKSVN

SEQ ID NO: 459 - protein, 79 aa, Streptococcus pneumoniae
MLEEGTKDQLAELTYPFGRGVNLSFGIKDVSKLYQKVMEANYPIYRPLTKRKFRVSDPYIYPHKFAVLDPDGYFLRFSE

SEQ ID NO: 460 - protein, 75 aa, Streptococcus pneumoniae
LACDKHGKGCFTDISALLIGDIHIHHTGCTTLMDTFSFNGQYIVEFSCLKVVDRGLECHPIKSQRDNHQTTDLVT

SEQ ID NO: 461 - protein, 53 aa, Streptococcus pneumoniae
MGIAIVVERRVHYFGRHHNVTISHFFNFVIFKGRYSVKMKVFHRFLLIFQTTL

SEQ ID NO: 462 - protein, 117 aa, Streptococcus pneumoniae
MIACRHDICKSQKGLEHPFCIVRRLTRDFNQRPVCIVEANIFCLKITPQIIANMIVARTVKSSKTGITLTTSMCKRDNHKITWFHRRNGFPSFFNNPNRFVSTIFVSNFRFWITVPP

SEQ ID NO: 463 - protein, 69 aa, Streptococcus pneumoniae
MNMNKDQIAILNGADNLNLTLWMTLKEICKEGCKSFFPVRNTCRMLDIGIPYRLGLSLSNSSVLNGMDV

SEQ ID NO: 464 - protein, 139 aa, Streptococcus pneumoniae
MDGQLHHRAIFDWVHFENFINSWLGFLTINLKTTGQGAEIVLIGHTFNTRDINLVNLITRVNHLVCKVPIIGQNQDTRCIPVQTTHRVNTFFDIGQEVDNRLATLVICYTGNDTAWFVKQIIDLFFVVDRLTFNFDLVA

SEQ ID NO: 465 - protein, 90 aa, Streptococcus pneumoniae
MHKLRIFVNQLYRRFGIILGPFLVLGFQVLTQELELAIFFDLREEVLLQVIPQVCHFCYLRKEFTTLNQHELTSHDHVLTRHFQTHGLQG

SEQ ID NO: 466 - protein, 44 aa, Streptococcus pneumoniae
MLHMNLFFQPFFTNLCKTLATGCCVKTVMEWSSIATTIDFKIIE

SEQ ID NO: 467 - protein, 37 aa, Streptococcus pneumoniae
LDNRAKEWIMSTAQNQAIHLSNQGTQGFIDHLLGNTG

SEQ ID NO: 468 - protein, 41 aa, Streptococcus pneumoniae
LSNFCFKTVTVHRYSVNTNVNQNFSTISCFQTKSVPCWKGN

SEQ ID NO: 469 - protein, 46 aa, Streptococcus pneumoniae
MKIKEQTRKLAAGCSKHCFEVVDETDEVSNHTYGKATLTWFEEIFE

SEQ ID NO: 470 - protein, 71 aa, Streptococcus pneumoniae
MSIVKSHSFSISLGIFNSFWNNIHTSECFYFLCKGKSNRSNSTISVNQMVFFINIQRFYCFAIEDFCLLRI

SEQ ID NO: 471 - protein, 44 aa, Streptococcus pneumoniae
LNTLLPPDNLCLFTIYLTGFSCICINSYCHNFWEIFNQLFYQLS

SEQ ID NO: 472 - protein, 257 aa, Streptococcus pneumoniae
MIDKVIEQYKSHDNLDIRVELHKKYSKNKLGFNNWIFSNYQITDEVKVLELGCGTGELWKSNSDSIDKMKQLIVTDFSKDMVKSTKSVIGNRNNVNYEIMDIQKISFENETFDIVIASMLLHHVNDIPKALSEVNRVLKTGGIFYCATFGENGVVNYLASLFKDEVNQDLENRTFTLQNGKRYLSRYFNSVDTLLYDDELQVTSIDDLVKYIQSFKGISEIGSLEEEIIRKRLESEFNNGMLIIPKEYGMFIARKES

SEQ ID NO: 473 - protein, 81 aa, Streptococcus pneumoniae
MDLGFDYFGSALTISPHKNSQTINSIGIDVQKIYTPHYLPNDFKKNQGYKRSVEMCEEYDIYRQCYCGCVYAAQAQNIDLV

SEQ ID NO: 474 - protein, 54 aa, Streptococcus pneumoniae
LTKYADVTIYFANSNIHPKAEYHKRVYVTKKFVSDFNERTGNTVQYLEAPYEPN

SEQ ID NO: 475 - protein, 131 aa, Streptococcus pneumoniae
MYNKVILIGRLTSTPELHKTNNDKSVARATIAVNRRYKDQNGEREADFVNMVLWGRLAETLASYATKGSLISVDGELRTRRFEKNGQMNYVTEVLVTGFQLLESRAQRAMRENNAGQDLADLVLEEEELPF

SEQ ID NO: 476 - protein, 121 aa, Streptococcus pneumoniae
MQFTRTAHHTKTLFTTKFTWENEIPFWHHSSRKRDNGFQPHTRIGSSCNDLYSLITCDCNLADVEVVTIWMGYHLNNFTDNKLRFLIINNFFCKTFRLQLLVQTSDLLICQKDLTALCNFK

SEQ ID NO: 477 - protein, 63 aa, Streptococcus pneumoniae
MSYSVDDVVSNAFKKRMILDSFFAFNCSGTMKVSTWVYDKGEWYYVSSSGAMIANDWVKDNGK

SEQ ID NO: 478 - protein, 51 aa, Streptococcus pneumoniae
LTSFCFKANMFNNCLRICRIAEGHILKLDLTFEVFISQLHLNRVLDRRMQI

SEQ ID NO: 479 - protein, 66 aa, Streptococcus pneumoniae
LINPLSRDHSSGKNDEECSHEKEAHDNLHSIRHENNHVTKERQTRYRSSVVNHIGPNPVNRHTQTT

SEQ ID NO: 480 - protein, 100 aa, Streptococcus pneumoniae
LHLRTCFVRQTNKLSPLINRTRLQFHQTILHYTLNQITSNRLGNIEFLLDIFNQDQVLVFLAIIQKMHNLTLRPTHKFNAATFGFLLHHQVNLMTKTLKD

SEQ ID NO: 481 - protein, 65 aa, Streptococcus pneumoniae
MLEIWKYRPFVSEFWNDFKNNHDKQFVDPISLYLTLKDDDDPRIEEESEALENMILQYLGEDDAS

SEQ ID NO: 482 - protein, 47 aa, Streptococcus pneumoniae
LTLFFFELLICLLNSEFDLSKFIFVYFDEYFHEDSLKMNLHQFSFSF

SEQ ID NO: 483 - protein, 43 aa, Streptococcus pneumoniae
MAFNQFNRCIGLSIPTAPNVPGTIINRSYLHDATVPNNVREKT

SEQ ID NO: 484 - protein, 44 aa, Streptococcus pneumoniae
LRLQIELTWFEEIFEEYKFEIMKIRQTGGCFVSHLTERDGLRVT

SEQ ID NO: 485 - protein, 56 aa, Streptococcus pneumoniae
MKKNRGIQKLAILVLLGVFMFSNTIPYQQFIQKNRQLEIRVQSQKKSNGLDVGKAD

SEQ ID NO: 486 - protein, 671 aa, Streptococcus pneumoniae
MKKLFILISNLLASLFFVWVLTIWTDTYVSHYYPNVVVRDSSPETTFQHVATRLEKLAEETDSFIAIQHQDPNSEGTTVFSYTTFGDGKLPDGLQEKNLEDAQSSSVETNYFVFDGHLDIHLLREELSQLGLTNMHLTIPSKLSTLMAIFSNGFQLISLLIFILTFVALTLISQISQLRSSGIRLISGEKRWSIFLRPVGEDLKAIAVGFSLAGVLAILMQKILSLPTQSLMTIGEGLLSYNLILLSISLFFAQLFAVGIKKIHLMQIIKGQVPVRGIISLILIGQLLAIIIVTLGIGSSLKYSQAWQQHRIGQEIWSQERQLITLSISREGTSPGFDEQAQRKLRTWYQLMDLAVSEQKAFLSRHQLIDRTLQNGMASSKNLITSTEWHDYNPNGNVLIVTPQYLERQNIPVDTTIEQKMNHLNVGEFVLLLPEHLRSEEEHYKSVFEDDLTSRISSQDERQQMTATVGYLESGQDRFVYNTTPISYQQFLKDPIIIVITPQSTGPQSILFWIDAVQNYVLFNQLSDAQELIQRQGIENWVSEMQTGYHNYITLLDNIQRERWVMLAGAVLGIATSILLFNTMNRLYFEEFRRAIFIKRIAGLRFLEIHRTYLFAQLGVFLLGFVASVFLQVEIGVAFLVLLLFTGLSLLQLHVQMQKENKMSILVLKGG

SEQ ID NO: 487 - protein, 124 aa, Streptococcus pneumoniae
VLKWCILRINHHISRKVDNFLEGTRAHIKGQAHTAWNPLEVPDVRYRSFQFDMSHTLTTNFRTRYFNPTAVTNNSSVTNTFVLTTSTFPVFCRTKDHFIKESFTFWFQGTIIDCFRFFDFSIRP

SEQ ID NO: 488 - protein, 44 aa, Streptococcus pneumoniae
LVDPLVTSHDNLLSKGSIFIQTRVSLSYSIFIFFISCQPNNFRS

SEQ ID NO: 489 - protein, 39 aa, Streptococcus pneumoniae
MPWKELCHKLAPKVFKVIRIYSRENKKSPSNWAFCSFET

SEQ ID NO: 490 - protein, 54 aa, Streptococcus pneumoniae
VSVLFFCSYFSLSLEKGWFSSLISCKFMNQFLPFCWRQDSPWILTLAQDSITYH

SEQ ID NO: 491 - protein, 43 aa, Streptococcus pneumoniae
VTDENTRKVRSLVAFFSIVIGYILSSFFISLYHLWQEALRGLL

SEQ ID NO: 492 - protein, 65 aa, Streptococcus pneumoniae
MRLLFFFANRVIRSKENSSTCPSRSYNLLINTSNVSHITIAVNGTCTGNNTTITKIWVSYLSIDS

SEQ ID NO: 493 - protein, 52 aa, Streptococcus pneumoniae
VDSLFLSLGEEGNQEINLQESFSSTDCNPTLISPETTVAQGLCQDIIYRPFT

SEQ ID NO: 494 - protein, 175 aa, Streptococcus pneumoniae
VNPKSLGSFFLQDSKGFKELVLGHAKLSLPRIVHNVCPQFKNASRIITTRDDFWNACYSLQMFNIFKGIQVNGRTQFTCIGVFLVWRVVGREHNLRTQKVQFMAHQKLYITRAVHTTTFFLENFQNSWSWSSLNCKIFLKALVPRKSLVDGSCLLTNPLLIIQVKGSRELGNNRF

SEQ ID NO: 495 - protein, 39 aa, Streptococcus pneumoniae
MTTIRSLLLNFISISYSIFIQKIKKQTRKLVAGGSKHCF

SEQ ID NO: 496 - protein, 54 aa, Streptococcus pneumoniae
MDALVLQKNQETIQQIAVKIRFLDGHDYYSLIDIDNRRTNQTVFPFVNFEDIAF

SEQ ID NO: 497 - protein, 41 aa, Streptococcus pneumoniae
MAFFTEIPTRACLINLAITLHIVETCQGFNDLSLHLRVLAL

SEQ ID NO: 498 - protein, 37 aa, Streptococcus pneumoniae
MLLPLPFNTSKIKQIAMHSDLNQKEMIGHIFHDEDIF

SEQ ID NO: 499 - protein, 98 aa, Streptococcus pneumoniae
MKQTVKKLALVASIAATLGGSVAVASAAVQYPEGGVWTYGSGNGGAYSNYYHPSKYHSSTVVSRKTGSSDKGYAGAGGTSRAWIRTSWGEKVAFYYNV

SEQ ID NO: 500 - protein, 47 aa, Streptococcus pneumoniae
MLNRRFIKTNNIHLCHTHLSSQGNFFCLTTCKFFYIQVCMCIKNHLF

SEQ ID NO: 501 - protein, 123 aa, Streptococcus pneumoniae
MNTIERTRRLVKGCATHCFEVVDRTDEVSSKHCFEVADETDEVSSKHCFEVADETDEVSSKHVFEVVDETDEVSSKHVFEVVDETDEVSSKHVFEVVDETDEVSNHTYGKATLTWFAEIFEEY

SEQ ID NO: 502 - protein, 365 aa, Streptococcus pneumoniae
MLERLKSIHYMFWASLIFMLFPILPVVIGELPAWHLLVDILFVVTYLGVLITKNQRLSWLFWGLMLVYVAGNTAFVAGNYIWFFFFLSNLLIYHFGVRSLKSLHVWTFLLAQVLVVGRLLIFQRIEVEFLVYMLVILTFVDLMTLGSVRIRLVEDLKEAQVEQNTQINLLLAENERNRIGQDLHDSLGHTFAMLSVKTDLALQLFQMQAYPQVEKELREIQQISKESMCEVRTIVENLKSRTLTSELETVKKMLEIAGIEVETDNQLDTASLTQELDSMASMILLELVTNIIKHAKASKAYLKLERTEKELILTVSDDGCGFAFLKGDELHTVRDRVFPFSGEVSVISQKHPTEVQVRLPYKERN

SEQ ID NO: 503 - protein, 294 aa, Streptococcus pneumoniae
MTVVKVEKLSKKIKDKEILRNISFEINDGECVALIGPNGAGKTTLLDCLLGDKLVTSGQVSIQGLPVTSSKLDYTRAYLPQENVIVQKLKVKELIAFFQRIYPNPLSNQEIDQLLQFVKQQKEQLAEKLSGGQKRLFSFVLTLIGRPKIVFLDEPTASMDTSTRQRFWEIVQELKAQGVTILYSSHYIEEVEHTADRILLLNKGELIRDTTPLAMRSEEIEKHFILPIAYKEVVEQSNLVENWTLKQDSLQVVTREADAFWELLAQAGCRMQEIEVNNRSLLNTIFEETQKGDN

SEQ ID NO: 504 - protein, 49 aa, Streptococcus pneumoniae
MGEEEMRNKMIIAMSLVVTGVMTYLMFSGLDEDFCHFPWKVFAGFGIMS

SEQ ID NO: 505 - protein, 37 aa, Streptococcus pneumoniae; identical to SEQ ID NO: 452

SEQ ID NO: 506 - protein, 54 aa, Streptococcus pneumoniae
MPSLRSLKKTDGSCDELHHFDLPVNFFKNTVLGKQTCSGVIREVCQDCFNMLWR

SEQ ID NO: 507 - protein, 59 aa, Streptococcus pneumoniae
LHTSFRSSVGHSHTWHQDIVRPILFSRFNDSIVILWQNCPTFNQGIYCYLDCFFPIVSL

SEQ ID NO: 508 - protein, 66 aa, Streptococcus pneumoniae
MWSQTLGLIHPLTSLLELPFWMACLKGFGQFCKSLSGLLSFVAECQHLLSLCSRFIRITVLQTSKV

SEQ ID NO: 509 - protein, 126 aa, Streptococcus pneumoniae
MLEQARLKVEQQAIKNIQFLEQDLPKNPLEKEFDCLAVSRVLHHMPDLDAALSLFHQHLKEDGKLIIADFTKTEANHHGFDLAELENKLIEHGFSSVHSQILYSAEDLFQGNHSEFFLIVAQKSLA

SEQ ID NO: 510 - protein, 60 aa, Streptococcus pneumoniae
MKHDFNHKAETFDFPKNIFLANLVCQAAEKQIDLLSDKEILDFGGGTGLLALPLTPSQAG

SEQ ID NO: 511 - protein, 65 aa, Streptococcus pneumoniae
MVDLQSFFTRKYLNLNSVDAYLILPRLQGHLSYPQDFFLLQDFCFLLPIFLNLSQKEGRNAGKDS

SEQ ID NO: 512 - protein, 96 aa, Streptococcus pneumoniae
  misc_feature 90...91: Xaa is any amino acid
MRIRNSPFDHILQTIFEFEDRTCQVTCRFEACSSICNDNWEFSQHIISVFQSPSCHTVCDKSDVFCSFLFDKNFASLWIYVVTITDQLCXXIPFIN

SEQ ID NO: 513 - protein, 37 aa, Streptococcus pneumoniae
MHKTCLNIWKFLFYQIESLIHQMAADKSPCRIGNRGR

SEQ ID NO: 514 - protein, 83 aa, Streptococcus pneumoniae
LNHRFNRQTTKVGRSTIWANGTVNRLIIFVIRSTCIVLINGHSFRCQTSSSTSLPNTKDKVRLITIHLFFQYLSRFVKNCRHL

SEQ ID NO: 515 - protein, 41 aa, Streptococcus pneumoniae
MTLHQTFRFQNFEMPCQSSLINFQTLLNRHLVTRRMLQQKQ

SEQ ID NO: 516 - protein, 380 aa, Streptococcus pneumoniae
MKKRMLLASTVALSFAPVLATQAEEVLWTARSVEQIQNDLTKTDNKTSYTVQYGDTLSTIAEALGVDVTVLANLNKITNMDLIFPETVLTTTVNEAEEVTEVEIQTPQADSSEEVTTATADLTTNQVTVDDQTVQVADLSQPIAEAPKEVASSSEVTKTVIASEEVAPSTGTSVPEEQTAETTRPVEEATPQETTPAEKQETQASPQAALAVEATTTSSEAKEVASSNGATAAVSTYQSEETKVISTTYEAPAAPDYAGLAVAKSENAGLQPQTAAFKEEIANLFGITSFSGYRPGDSGDHGKGLAIDFMVPERSELGDKIAEYAIQNMASRGISYIIWKQRFYAPFDSKYGPANTWNPMPDRGSVTENHYDHVHVSMNG

SEQ ID NO: 517 - protein, 58 aa, Streptococcus pneumoniae
MSNQITVHHSHEHLQKVFTHSWQCNIKNVFIFLKQSLLLMKRNSVGFPTEFTPSILKS

SEQ ID NO: 518 - protein, 69 aa, Streptococcus pneumoniae
MAELNSVITTVTGIENRLGAVILAEIRNIHAFDNPAQLQAFAGLDSSIYQSGQIDLAGRMVKRGSPHLR

SEQ ID NO: 519 - protein, 284 aa, Streptococcus pneumoniae
  misc_feature 3...5: Xaa is any amino acid
MEXXXDIRKGRHAVVEKVMGAQTYIPNTIQMAEDTSIQLITGPNMSGKSTYMRQLAMTAVMAQLGSYVPAESAHLPIFDAIFTRIGAADDLVSGQSTFMVEMMEANNAISHATKNSLILFDELGRGTATYDGMALAQSIIEYIHEHIGAKTLFATHYHELTSLESSLQHLVNVHVATLEQDGQVTFLHKIEPGPADKSYGIHVAKIAGLPADLLARADKILTQLENQGTESPPPMRQTSAVTEQISLFDRAEEHPILAELAKLDVYNMTPMQVMNVLVELKQKL

SEQ ID NO: 520 - protein, 141 aa, Streptococcus pneumoniae
LTNLSSVDSEELFQFYRERGNAENFIKERKAGFFGDKTDSSTMIKNEIRMMMGCLAYNLYLFLKQLAGDEVKALTIKRFRRLFLHIAGKYVSTARRHILKFSSLYAYSKQFQALFDTICQINLILPVPYRARGQGKTCLTE

SEQ ID NO: 521 - protein, 67 aa, Streptococcus pneumoniae
LFDDRQAINICPPTNGSLRLTSLQVDQNPCPPSTNLNKILARSQFLNHIQQISLSLELLQANLWNLV

SEQ ID NO: 522 - protein, 42 aa, Streptococcus pneumoniae
LSVHFCSSHRCLLVRYNDTYSTKKGLKFETFLSVFRYDFLGM

SEQ ID NO: 523 - protein, 144 aa, Streptococcus pneumoniae
MDFFNYLLWMICHNHGLHTLLLSKDCVCHTARDKDGNHRIKSVFPTKGQTCYQHDSSIYQERNTTDILTRFLANSQADDIRPTTGDIVSKSKTNPQTHNNTPKKGIDNGILRQGCHRDKLDKEGTHRYRDKGKDGELMANLIPS

SEQ ID NO: 524 - protein, 78 aa, Streptococcus pneumoniae
MKIKEQTRKLAAGCSKHCFEVVDETDEVSSKHGFEVVDETDEVSSKHGFEVVDETDEVSNHTYGKATLTWFEEIFEEH

SEQ ID NO: 525 - protein, 63 aa, Streptococcus pneumoniae
MKIKEQTRKLAAGCSKHCFEVVDRTDEVSSKHGFEVVDETDEVSNHTYGKVKLTWFEEILEEY

SEQ ID NO: 526 - protein, 306 aa, Streptococcus pneumoniae
LFFKDEKQALYTKPKTKSSSFRASKVSNQTIVATTRTDCQVIALNLCDKLENGVVVVVQTTHHIGIDDVIYSKIFQHLTHSIKMSLAFFIKKVQDRRRILYCHLVFFFLRVQDTKRIFLQATLAILRQGLLERCQIVNQGLAVGCTALRISKSVEVQFDTLNTDFLQKMGCHNDCFHIGSWIARTKTLNTNLVELAQAPCLWTLITEHRSHVVELAWLLHFWGEEFIFHIGTDNGRSSFWTEGNMTVTLVIKIVHFLGYDIRCISDRATDNLVMLKNRRAHFCIVIALENLTGKALNVLPLSRFSR

SEQ ID NO: 527 - protein, 283 aa, Streptococcus pneumoniae
MEQIGKVFRQLRESRNISLRQATGGQFSPSMLSRFETGQSELSVEKFLFALENISASVEEILFLARGFQYDTDSELRKEITDVLEPKNIAPLEDLYRREYQKHAHSHNKQKHILNAIMIKSYMKSMDERVELTAEEGKVLHDYLFSTEIWGIYELNLFSVSSAFLSVSLFTRYVREMVRKSDFLMEMSGNRNFFHTILLNGFLASIECEEFTNAYYFKRVIEEHFYKENETYFRIVYLWAEGLLDSKQGRVKEGQKKMEDAVRIFEMLGCNKSAEYYRNTTEC

SEQ ID NO: 528 - protein, 38 aa, Streptococcus pneumoniae
LIPYFLHFIIFFRKFIKNLPNCQNYEKIEDIYHVEGLL

SEQ ID NO: 529 - protein, 54 aa, Streptococcus pneumoniae
MKIKGQTRKLAAGCSKHCFEVMDRTDEVSSKHCFEVVDRTDEVSNHTYGKATLT

SEQ ID NO: 530 - protein, 78 aa, Streptococcus pneumoniae
VVPFSDTFKDRNQVDIFTIKISRCNSSTIGENSWDIHISNSNHRSRHVLVTATDSDEGIHVVTTHSRLDGVRDDVTRC

SEQ ID NO: 531 - protein, 37 aa, Streptococcus pneumoniae
MKKFSYPTRQTGEGVKYQSQMVRQWFLIRIFRLFSVA

SEQ ID NO: 532 - protein, 55 aa, Streptococcus pneumoniae
VVLDHQNQLFEARFLEHTNPLTRIQLTRVKALRILLSSPPFLVIKGIRTEVDKSC

SEQ ID NO: 533 - protein, 42 aa, Streptococcus pneumoniae
VQKLKKAIYKAHLKDSDDFRPETSTPNLFESCLKLCPCFLSS

SEQ ID NO: 534 - protein, 96 aa, Streptococcus pneumoniae
MGALGYYEGFVPYVSNQYKNQAEEEDKPLSDKYIFEKILGKTYAAFKKDQINERVEKLGKLKPITINYNGKSEVIDSKEKLQELMNKAVKDEVAQI

SEQ ID NO: 535 - protein, 88 aa, Streptococcus pneumoniae
MMGDGMKEFQFERKQRFSLRKYAIGACSVLLGTSLFFAGMGAQPVQDTETSSALISSHYLDEQDLSEKLKSELQWFELENKLLNLWEH

SEQ ID NO: 536 - protein, 52 aa, Streptococcus pneumoniae
MKIKEQTRKLATGCSKHRFEVVDKTDEVSSKHCFEVADRTDEVSNIYTARRR

SEQ ID NO: 537 - protein, 211 aa, Streptococcus pneumoniae
VNITKTSIIKAHTTKEDGIDHTFTRFNIMSIFYSTRKIFLDKLNSTNRQFLGYIISTRCYQSFNSVSQSIHTSSSSQAFRFGKHEFRVINRDKSKAILVNHYHLNLAFFISNHIVNSDFCRSSCRCIDSHNWQAFFSRLMKPFIILWFSTICSHDRNTTSCILWRTPAKTDDKVTAMFLQSSYPICDIFTSRVWLYIAKDDIFDSFCIQWF

SEQ ID NO: 538 - protein, 242 aa, Streptococcus pneumoniae
MSQDEKLIREQICDVCHKMWQLGWVAANDGNVSVRLDEDTILATPTGISKSFITPEKLVKLNLKGEILEAEGDYCPSSEIKMHIRCYEEREDVRSVVHAHPPIATGFALAHIPLDTYSLIESAIVVGAIPITPFGVPSTMEVPEAITPYLPDHDVMLLENHGALTVGSDVITAYYRMETLELVAKTTFHGRMLLSTKGIEEQEIARPTLERLFSMRENYKVTGRHPGYRKYNGDGSMKETEK

SEQ ID NO: 539 - protein, 1005 aa, Streptococcus pneumoniae
MESKKIAKQILIATAVLTSFLGSNLVYADVVQSNSNNRASTETARVTGNNLEKLITKDKEIDKEMTYLSDMDWSSATHGDIDKTKTVQKDAPFTTGNKGEHTKISLLTSDDKVKYFDKGIGTVADSPSVISYDISGQGFEKFETYIGIDQSANSSRSDHAVVDRIEIEIDGKVVYSSSVTNPEGFRYNTQAQFISVTIPQNAKKISLKSFAGEHTWGDEVVFADAKLIKTVSTQTITPDLLNKGINGGVYLSDLEWVDATHGDDDKSKTVQKDKPFTPGNNGSNNKIKLLIDGKEVEFNKGLGTVASNPSSIKYDVSGANVTRFISYVGIDRSANHLNSDYADIQKFEVVADGKVIYSSDSKYPKGIKYDTSAFLVDVEIPKDTQTIELKSYSGKHTWADELVLGGALFMANGKFKNPNDWSEVDKRREINNEHPLLMMPLYANGEEFNQGKYTFWGGDTLTGKWENIPDDLKPYTVIQLHPDDLPKRDGAARDFYEHMLEEAAKYVNPKTGKNEPIPVILTVYTAGNMPYYTSAHWLSTSWIDKMYQKYPNLHGIFSTENYWIWANDIENKAADYLKVSAKNGGYFIWAEQNNGSAIEKAFGKNGKIAFQKSVDKYWKNLIFMFKNTPAAEGNDSTTESYMKGLWLSNHTYQWGGLMDTWKWYETGKWKLFASGNIGKSQGDRQWLTEPESMLGEEALGVYLNGGVVYNFEHPAYTYGVNNKESLLFSEVIKEFFRYVIAHPAPSKEKVLEDTKVFIHGDYSNKGNGKFFVNVNTDREQTPLYMTGRYNVIPAIPGVLKTDKLKESVSSSRIQIKEITSPEFSSTQARKEYLNKLYPMNYEGDIFAQKLDNRWFVYNYKVNENVKQTGKLKFNSLEMNVEFEPHTYGIFERISNGLKVNLNNFRTNKDSLWSNAQDANQAKKLPQLTKKGAIKWIEEHYIKDTQFGEKRVTKIVLRGIDKLPTIHSLSGTNNSYDQPSLNFDQKNHMVTITINSNGNLEFELHF

SEQ ID NO: 540 - protein, 738 aa, Streptococcus pneumoniae
MTIYINKDETVFHLAMKDSSYIFRILENGELQHLHFGKRIHVKENYNQLMAYKKRGFEVSFSEEFEDIQQSMIQNEYSSYGKGDFRHPAFQVQGMNGSRITTLKYQGFELEKGKNRLNSLPSTFDDIGQCAETLTIILTDSILDLTVRLNYTIFPEYNVLVRNTEFLNNSNNKLTLLKAMSLQLDLPDSQYDFIQFSGAWLRERQLYRTSLRPGIQAIDSLRYSSSPQQNPFFMLSRRETTEHSGEVYGFNFIYSGNFQNMIEVDHFDTARVTVGINPVEFRFLLNPAESFVTPEAIVIYSDQGMNQMSQQLSDFYRHHLVNPNFSQASRPIILNSWETFYFDLGTEKILDLAKAAKDLGIELFVLDDGWFGHRKDDKSSLGDWVTDRSRLPEGIGFLADEIHKIGLQFGLWFEPEMISIDSDLYKNHADWTIHLLDREKSVGRNQYVLDLTRQEVVDYLFDSISKIIIKTNLDYIKWDMNRHITDIYSIELDSEQQMEFGHRYILGLYQLLDRLITKFPSVLFESCSSGGGRFDLGLMYYAPQAWTSDDTDPIERLKIQHGTSYGYSPSMMTAHVSISPNEQSGRQTSLDTRTNVAYFSSFGYELDVTRLSVEEKEQVREQIQFYKKYRSLFQYGDFYRINSPFSCDSASWQVVSKDKCQSILLYAQLNSKLNPGYTRVYFSGLDKDKCYSVSRFDEFFYGDELMNAGIKVSLSNLALCVPEYLTKLFVIEEVVCKY

SEQ ID NO: 541 - protein, 623 aa, Streptococcus pneumoniae
MKIENKNVRRNFFWGEGRFYTTDIVNKRAGVMIKNVSKEEFTITLENGIKLSSTHFSAIVREEGDTRIQVSFVCPSIRLRLIFESRDDVLSKQLVLESSTEVIKSVEVESFEFETEDNIFYPKRQDCIKEMANFSGYYVELGQPVYANSLFLGMEFPMSENKVDGRHYVSRYYLGTVVNQEKSLWSCIIGGACSYKKEEIQEAFFEYVEGIAQPSYFRKQYNSWYDHMTDITEEGILKSFSEIRDGFENHGVHLDAYVVDDGWTNYQSVWEFNHKFPNGLRNIKYLVNGFGSSLGLWIGPRGGYNGTEIIMSDWLEAHPELNIGSKNLISNDVNVADFNYLNQMKKKMLEYQKEFDISYWKIDGWLLQPDKPDKSGPHGMYTMTAVYEFLIQLLIDLRKERGGKDCWLNLTSYVNPSPWFLQWVNSLWIQISQDVGFTENAGNDINRMITYRDSQYQEFLEKREIQLPMWSLYNHEPIYAVSANTWYMDHQMFASIPDFEAYLLFISTRGNAFWEFHYSFDMFDEERWKANARAVKWIEENYQTLKYSKKIGGSPEKFEIYGYKCHNQKTSTEILSLRNPAQIKQKIKIENLSIENFTRVIGDFTIQEDEIELAPYSIVILKK

SEQ ID NO: 542 - protein, 439 aa, Streptococcus pneumoniae
MKHTLETINSRIQWFREARFGMFIHWGLYSIPGKGEWIRSHQKLSIEDYEPYFRAFDPKEYNPREWAKQAKAAGMKYMVLTAKHHDGFCLFDSKFTDYKATNTPAGRDLVKEFVDAVRAEGLKVGLYFSLIDWHHPDFPKYADLNHPMRGNEVYRDEKINFDSYLEYLHNQVKEIVTGYGQIDILWFDYSYEDMVGEKWGASKLIDMVRHYQPNVIVDNRLETSGEGFGSIVTDEITSYAGDFVSPEQIVPHEGIRNFKGEPVPWELCLTMNNNWAYNPTDYLYKSSQTLIRKLVECVSKNGNMILNVGPDALGRINDSSKKILDNFHRWMSRNGEAIYGCSGDENLPKPDWGYYTRNGNTVYAHVFEQPIGPLALLGISKENVKRMSFLHDGSEVKISESWTTNAYKGICFAQFGEVPHFTYPLPDLIDSVIKIELRE

SEQ ID NO: 543 - protein, 279 aa, Streptococcus pneumoniae
MNTHINGISKKGKVLIYGYMLLTILISIFPIAWIFLSSLKADPMKNPGISLPTDFTLEGYINVFTKLHVFTYFWNSFKVVSISVIISIVMISMSSYVIARMEFRGKKLVTSMLYSTLFIPATAMTFPVYRLVNELGIYNTPVALILVYSCSGIAMSFFIIKNYFEIIPKELEEAAEIDGATYAQTFWKVMLPIARPGILTAAVLAFINNWNEYYWASMLVIDKNELTVPALLGQFTTSFNTNYNGLFSAIVVIVLPPIILFAFTSKYFIEALGGGAVKG

SEQ ID NO: 544 - protein, 309 aa, Streptococcus pneumoniae
MAQKIMSLQNRKNQKRRFIFLFLLPTLICFFLFYFYSVVTIFLTSFAKWDYTNLNTPEFLGFDKLFENYRYVFKEYPFFTEALINSVRWAVIGVIIQVPLAVSVAITLSKKLKGWKISRNLYIVPSIISSAAMGLIFLQIYNPNYGVVNQIIHLFNPSFKDSVLLTPGLNIVAMTGAYIFFAGASTIMILGQIFAIPEEVQEAAILDNITGWRKEWYITIPMIKGTIKTVSIMAATSGFLLYNEVFFLTNGAAGTKSISFVIRELAVASSRTQYARANTIGVIQILGGMLIIVCINILFRERKRLKGEK

SEQ ID NO: 545 - protein, 430 aa, Streptococcus pneumoniae
MNKKSLLKCAVIGLVATFGLAACGTSKDASGGSSSGKEVLEFYHGYHHSEDEWPVAKTMRDLYDKFAEEHKDSGVEFKPTPVNGDLKDIMNNKVASGEFPDVIDLAGNAVSLAAIEQKLVLDLKPYIDSNKLEKNVGLNYKQNQKDGKIYTVHEQLFTMGLWYNKDIFAKAGAKTPDQWNTWDDFTQAMASIRKQDGVYAFGAGEPSIRLFNTVLGTTENGRKLLDKPLTKEGIESKEFADALKMVMKEIQANGSKNAGGDANAYSKDFQEGKSAVFFNGVWASGEMSKNPSLAPGIYPAGVAISSSGGGITISSKMSEAKQKLALEFLKYMTSDDVQKVIFEKVGANPSNENVNVKELSEKSSEATTKILGQAITQVKNAKAVVPTVSDVWGGDVHTAIINALTESAAENVDVDQKVKSTQDVLKSLIG

SEQ ID NO: 546 - protein, 49 aa, Streptococcus pneumoniae
MNIAIRIILNFFRVMGNHQNSLAMMMGAVVHEFVKFIFTSCIHPRCRLV

SEQ ID NO: 547 - protein, 54 aa, Streptococcus pneumoniae
MLLIMSIQTTEPAFSRIATRLDKFIDRTWKTSIKTGNLLRKIGYSQFLTLRICL

SEQ ID NO: 548 - protein, 66 aa, Streptococcus pneumoniae
LQNSKTGLDERRLSRSIFPSQGNKFPTINTIIDMFKNRLLIIIEGQILYRNISHYLISPTKAVKNR

SEQ ID NO: 549 - protein, 37 aa, Streptococcus pneumoniae
LTSLIPRLMFQKTSQLVSIKILLEGCWIIAIFTEPLR

SEQ ID NO: 550 - protein, 369 aa, Streptococcus pneumoniae
MSNSFVKLLVSQLFANLADIFFRVTIIANIYIISKSVIATSLVPILIGISSFVASLLVPLVTKRLALNRVLSLSQFGKTILLAILVGMFTVMQSVAPLVTYLFVVAISILDGFAAPVSYAIVPRYATDLGKANSALSMTGEAAQLIGWGLGGLLFATIGLLPTTFIILVLYIISSFLMLFLPNAEVEVLESETNLEILLKGWKLVARNPRLRLFVSANLLEIFSNTIWVSSIILVFVTELLNKTESYWGYSNTAYSIGIIISGLIAFRLSEKFLAAKWESILFPLVAMAIVTLTILYFPNAQMFLLFSALVGMLSQLKEVPESVFLQETVEENHLVNVYSVLEVISTLAFSVFVLLMSYITDFGYQPFV

SEQ ID NO: 551 - protein, 425 aa, Streptococcus pneumoniae
MSKLLDKILSRENMLEAYNQVKSNKGSAGIDGMTIEEMDNYLRQNWRLTKELIKQRKYKPQPVLRVEIPKPDGGIRQLGIPTVMDRMIQQAIVQVISPICEPHFSDTSYGFRPNRSCEKAIMKFLEYLNDGYEWIVDIDLEKFFDTVPQDRLMSLVHNIIEDGDTESLIRKYLHSGIIINGQRHKTLVGTPQGGNLSPLLSNVMLNELDKELEKRGLRFVRYADDCVITVGSEAAAKRVMYSASRFIEKRLGLKVNMTKAKITRPGELKYLGFGFWKSSDGWKSRPHQDSVRRFKLKLKKLTQRKWSIDLTRRIEQLNLSIRGWINYFSLGNMKRIVASIDERLRTRLRVIIWKQWKKKSRRLWGLLKLGVPKWIADKVSGWGDHYQLVAQKSVLKRAISKPVLEKRGLVSCLDYYLERHALKVS

SEQ ID NO: 552 - protein, 85 aa, Streptococcus pneumoniae
MFLRCATFKLADSRLNIFTCFFFGEIRFNSRNQVVKAFITDGTVISTIIVRGTVPCNQWTKTCPAAFDIINGDVGFWKAVVDNAK

SEQ ID NO: 553 - protein, 39 aa, Streptococcus pneumoniae
MLQITCVVCISCTKVSLVFTWENKDHTTVTQTCVKVNWL

SEQ ID NO: 554 - protein, 119 aa, Streptococcus pneumoniae
LRSLIRQITYFITPRTCCINNQTGLDFKYLVCQEITSYNTCNLATFVKEEAFCLHVVGNEGTVLVGTFDVFNHETRIVVTEVKIHSTSYQAFLLQVWLAFQDLILAQNLVRSWCVAHTC

SEQ ID NO: 555 - protein, 40 aa, Streptococcus pneumoniae
LHFNQTSLKTASCRLQGYTSSCDSSTDNQEVQGAFLHFFN

SEQ ID NO: 556 - protein, 38 aa, Streptococcus pneumoniae
LIHSKMFVKSIRLRKKRVWDKKILILGILYYKFLKSID

SEQ ID NO: 557 - protein, 415 aa, Streptococcus pneumoniae
MFASKSERKVHYSIRKFSIGVASVAVASLVMGSVVHATENEGSTQAATFSNMANKSQTEQGEINIERDKAKTAVSEYKEKKVSEIYTKLERDRHKDTVDLVNKLQEIKNEYLNKIVESTSKIEIQGLITTSRSKLDEAVSKYKKAPSSSSSSGSSTKPETPQPETSKPEVKPEPETPKPEVKPEPETPKPEVKPEPETPKPEVKPEPETPKPEVKPEPETPKPEVKPEPETPKPEVKPEPETPKPEVKPEPETPKPEVKPEPETPKPEVKPEPETPKPEVKPEPETPKPEVKPEPETPKPEVKPEPETPKPEVKPEPETPKPEVKPEPETPKPEVKPDNSKPQADDKKPSTPNNLSKDKQSSNQASTNENKKQGPATNKPKKSLPSTGSISNLALEIAGLLTLAGATILAKKRMK

SEQ ID NO: 558 - protein, 42 aa, Streptococcus pneumoniae
MDREILKFFQDLLSILSHNDMITLFCQKCCNSFSNHFLVICN

SEQ ID NO: 559 - protein, 44 aa, Streptococcus pneumoniae
MFITLRRICLRACVVEKEQSYLKFLFFQKRPVSFLHVKSVLAGI

SEQ ID NO: 560 - protein, 43 aa, Streptococcus pneumoniae
MVKTTDRLEAIGFSFILFENLFKPCQLYLQPQNSVLSNLQLAA

SEQ ID NO: 561 - protein, 60 aa, Streptococcus pneumoniae
MTRKLNPSYTNVASATTLTFNQVASTFRKACLDHVVNLTRNNLKGICQLTPLQLHDTRLI

SEQ ID NO: 562 - protein, 132 aa, Streptococcus pneumoniae
VKAPIPKAPLAHSFGSASIIAHTIHQKFNLKVPNYRQEEDWTKMGLPITRKEISNWHIKTSQYYLEPLYNLLRERLLTQPLLHADETSYRVLESDSQLTYYWTFLSGKAEKQGITLYHHVLIDLFISYFNPL

SEQ ID NO: 563 - protein, 47 aa, Streptococcus pneumoniae
LVSVFYSLLQVDNVDSVTFSKDVLSHLRIPATSLVTKVYTSLKKLFH

SEQ ID NO: 564 - protein, 37 aa, Streptococcus pneumoniae
LIVWILKNHTDLTTYIPNIFLSQTLAINYNLSGFCFQ

SEQ ID NO: 565 - protein, 38 aa, Streptococcus pneumoniae
MPYNRKPFSTFHVKRNILHIVVVLIFFIAKRKIFYINY

SEQ ID NO: 566 - protein, 81 aa, Streptococcus pneumoniae
MFKKMSNSSRILFYISVNFCDKRIYRTKLYSDTPVNLFKFLFRQKSNCQSVGQTSSINHFFYSWIVFFFKNNLCHSIPSIK

SEQ ID NO: 567 - protein, 112 aa, Streptococcus pneumoniae
LADGSGKLAEGGTKLTSGLEDLQTGLASLGQGLGNASDQLKSVSTESKNAEILSNPLNLSKTDNDQVPVNGIAIAPYMISVALFFAAISTNMIFAKLPSGRHPESRWAWLKS

SEQ ID NO: 568 - protein, 41 aa, Streptococcus pneumoniae
MKNTVKLEQFVALKEKDLQKIKGGEMRLSKFFRDFILQRKK

SEQ ID NO: 569 - protein, 37 aa, Streptococcus pneumoniae; identical to SEQ ID NO: 452

SEQ ID NO: 570 - protein, 80 aa, Streptococcus pneumoniae
LWVNIDHIRHISCENACLQYFTSIWYIDDFDLDLRVFLLKITSDFFQGFGHFFFLVEILDGHCVIRRFTIVGASAEPKQS

SEQ ID NO: 571 - protein, 46 aa, Streptococcus pneumoniae; identical to SEQ ID NO: 469

SEQ ID NO: 572 - protein, 86 aa, Streptococcus pneumoniae
LIDVLFINSFIGRICFYCYRRIHATCLFLQLFSIVILNVAHTLKHSIFIVITFISRCRNFIIVRILLENQFSRNQGIDNRVGQSRY

SEQ ID NO: 573 - protein, 39 aa, Streptococcus pneumoniae
MINVNQVSIEVKNTFKNWNFTSSIELTTFSKFSQSPTMT

SEQ ID NO: 574 - protein, 37 aa, Streptococcus pneumoniae
MGFSMKLIHDLDMHTTHSTAKMLYNVKAIKNDFSIRE

SEQ ID NO: 575 - protein, 248 aa, Streptococcus pneumoniae
  misc_feature 241...242: Xaa is any amino acid
MYQDLLRKIAEEKPNYNQEEIQWLLDHLGDPSPEIRDDLVFTSFARGIQEELFTQEQFHFIAEGVSSDGGLDKEIDKIGLPTLERSFRALIYATLLSDDANQQSVFYQELNAGFRNDLSNQGLHYLSKEKDTTGFSSQYGWVHSFAHGADLLTEVVCHPEFPKNRVHEVFDILGQLFKRISIRFTDDEDWRLARVIYEPILQGKLEQEQVASWIKTVDFPIEAREDFYKFSNFRSCLGKSXXIHSLIN

SEQ ID NO: 576 - protein, 38 aa, Streptococcus pneumoniae
MGFKVSHFKIPSSHLSINVLRTIENFTEIGQGLLHISP

SEQ ID NO: 577 - protein, 124 aa, Streptococcus pneumoniae
VGFFDFGLTNSCRQVRQFTQTVQDFLVCYHQGIVKEGQGYAGICFKFHPSLGNIGKFVIAIVRRLRHKSIVANMAHLNVDLFQFRKGLLEILKSVKIALVITAKLVDVFTSFLDCTQEILTVLV

SEQ ID NO: 578 - protein, 179 aa, Streptococcus pneumoniae
  misc_feature 175...176: Xaa is any amino acid
LKKAQWGFSNQGPDGLFLVRPTSNRDEIPPRDLAHPQNQLFLSFSQVEKLAWHAPSPLSEFALNISLPLSSPPYLWPFIQSPVLYCASHFSIHFNSFSSHLRLVITISPHLLSSTSLLLHTLCAQHTIHSTDLHHLRTPPPSGLFPLALYTRLAAPTLTYHTLSNIQSLKQQLVXXFIH

SEQ ID NO: 579 - protein, 60 aa, Streptococcus pneumoniae; identical to SEQ ID NO: 334

SEQ ID NO: 580 - protein, 40 aa, Streptococcus pneumoniae
MVNAMHFSFSILIEGNSRKVGICLLNRTHTRFKLSQAIYL

SEQ ID NO: 581 - protein, 215 aa, Streptococcus pneumoniae
MSQQLSDFYRHHLVNPNFSQASRPIILNSWETFYFDLGTEKILDLAKAAKDLGIELFVLDDGWFGHRKDDKSSLGDWVTDRSRLPEGIGFLADEIHKIGLQFGLWFEPEMISIDSDLYKNHADWTIHLLDREKSVGRNQYVLDLTRQEVVDYLFDSISKIIIKTNLDYIKWDMNRHITDIYSIELDSEQQMEFGHRYILGLYQLLDRLITKFPSY

SEQ ID NO: 582 - protein, 65 aa, Streptococcus pneumoniae; identical to SEQ ID NO: 156

SEQ ID NO: 583 - protein, 127 aa, Streptococcus pneumoniae
MKIKEQTRKLAAGCSKHCFEVVDRTDEVSSKHRFEVVDRTDEVSSKHRFEVADRTDEVSSKHRFEVADRTDEVSSKHRFEVADRTDEVSSKHRFEVADRTDEVSSKHRFEVADRTDEVSNIYTARRR

SEQ ID NO: 584 - protein, 53 aa, Streptococcus pneumoniae
  misc_feature 3...5: Xaa is any amino acid
MEXXXFKAGAKFFWAKLGLESLEAKEILRDGGWDDIVKNRCIKREQPRLIEEA

SEQ ID NO: 585 - protein, 165 aa, Streptococcus pneumoniae
MILLQNKSFCYSISQKETSLCHANVVTLNLHEALLNQISDNFSIKSSKRLSKFFLKSRHGNPGFLAESQEHFFFHLLLLTQVIFCNTSIAFLNRTEIMTNGTMIFIAYSIDITRCPCTNTIVFSIVPVHEIMTTFKAGFGEIRNLIMLKTRSLQLCNDVLKHLRF

SEQ ID NO: 586 - protein, 42 aa, Streptococcus pneumoniae; identical to SEQ ID NO: 558

SEQ ID NO: 587 - protein, 74 aa, Streptococcus pneumoniae
MEDHLLINAVDEFRSISFFQFFKHAFFHIFLVKTNILSPKTNSLIITKGSRTTCFFFACQIRSSWYLKNQTNIQ

SEQ ID NO: 588 - protein, 62 aa, Streptococcus pneumoniae
LFIRKKHTWINLTPKQTIFSQMNAQFFINFTRRALKRTFITFTSPTWQFPHIGPGNACLIIT

SEQ ID NO: 589 - protein, 70 aa, Streptococcus pneumoniae
LNIAYTDNPAHIFGKIFHDNLLALLIIFDDVTCKACLRQDKVNSGLFLDSLFNSGCKGVGFSLVRLVISI

SEQ ID NO: 590 - protein, 402 aa, Streptococcus pneumoniae
MCELDILHDSLYQFCPELHLKRLNSLTLACHALLDCKTLTLTELGRNLPTKARTKHNIKRIDRLLGNRHLHKERLAVYRWHASFICSGNTMPIVLVDWSDIREQKRLMVLRASVALHGRSVTLYEKAFPLSEQCSKKAHDQFLADLASILPSNTTPLIVSDAGFKVPWYKSVEKLGWYWLSRVRGKVQYADLGAENWKPISNLHDMSSSHSKTLGYKRLTKSNPISCQILLYKSRSKGRKNQRSTRTHCHHPSPKIYSASAKEPWVLATNLPVEIRTPKQLVNIYSKRMQIEETFRDLKSPAYGLGLRHSRTSSSERFDIMLLIALMLQLTCWLAGVHAQKQGWDKHFQANTVRNRNVLSTVRLGMEVLRHSGYTITREDLLVAATLLAQNLFTHGYALGKL

SEQ ID NO: 591 - protein, 57 aa, Streptococcus pneumoniae
  misc_feature 2...3: Xaa is any amino acid
MXXTKSSCLITTGRNDSPSTCLPRVASNNDRFSSEFRIIPDFHCSKKGIHVNMDDFS

SEQ ID NO: 592 - protein, 51 aa, Streptococcus pneumoniae; identical to SEQ ID NO: 308

SEQ ID NO: 593 - protein, 306 aa, Streptococcus pneumoniae
MDRGESLSDCVCMAGYEPANSSRLSIEGTYENKLYKLISSKYHTTGNDIMVCVPCGYTKYKETPGPHACTSCPGRTHAASTTNTNQDQCNRCPPGYYETNDPSYPCDVCSPNHICVGSDPMDPALMLYSGKRIKCDKNSVTLVPFEENVHLASCLCDKGYMARTRTGIVKCEAVPKNTYKDVVGNVGPTNCPPGSYTLKIGATDVSECVCKRGMFFDKDNKRCTVCPVGMYCLGGRLPNGEHMLPMMCTDGNAVTKDGGATSPGECLCKPGFYLRQDGPGGCVECPENTYKSFISNENCSPCPRIL

SEQ ID NO: 594 - protein, 274 aa, Streptococcus pneumoniae
  misc_feature 2...3: Xaa is any amino acid
MXXAFCLPVFAHPETLVKVKDAEDQLGARVGYIELDLNSGKILESLRPEERFPMMSTFKVLLCGAVLSRIDAGQEQLGRRIHYSQNDLVEYSPVTEKHLTDGMTVRELCSAAITMSDNTAANLLLATIGGPKELTAFLHNMGDHVTRLDRWEPELNEAIPNDERDTTMPVAMATTLRKLLTGELLTLASRQQLIDWMEADKVAGPLLRSALPAGWFIADKSGAGERGSRGIIAALGPDGKPSRIVVIYTTGSQATMDERNRQIAEIGASLIKHW

SEQ ID NO: 595 - protein, 53 aa, Streptococcus pneumoniae
MARFIRSQTLTLLEKLNELDADEQADICESLHDHADELYRSCLARFGDDGENL

SEQ ID NO: 596 - protein, 172 aa, Streptococcus pneumoniae
MTVRELCSAAITMSDNTAANLLLTTIGGPKELTAFLHNMGDHVTRLDRWEPELNEAIPNDERDTTMPVAMATTLRKLLTGELLTLASRQQLIDWMEADKVAGSLLRSALPAGWFIADKSGAGERGSRGIIAALGPDGKPSRIVVIYTTGSQATMDERNRQIAEIGASLIKHW

SEQ ID NO: 597 - protein, 103 aa, Streptococcus pneumoniae
  misc_feature 98: Xaa is any amino acid
MKIHKTVNPVAYENTYYLEGDKHLIVVDPGSHWEAIRQTIEKINKPICAILLTPAHYDHIMSLDLVRETFGNPPVYIAESETQLAPKPLPNNPLGPPXHSFIN

SEQ ID NO: 598 - protein, 45 aa, Streptococcus pneumoniae
LKGVDDFLFIFEEGFKQGGKARADRDYSGVSSLRNSSKVYLEFLY

SEQ ID NO: 599 - protein, 38 aa, Streptococcus pneumoniae; identical to SEQ ID NO: 262

SEQ ID NO: 600 - protein, 68 aa, Streptococcus pneumoniae
MRVAETSIVKKNHQIPCIINQKIAQKLIKKTSMTDIDHQLSISTSTVIRKINDFHFEHDFSRLPEIMS

SEQ ID NO: 601 - protein, 39 aa, Streptococcus pneumoniae
MFKSNLSLSQSLPHKDFFFFKRIIHLFSLFLLIDFIIIS

SEQ ID NO: 602 - protein, 420 aa, Streptococcus pneumoniae
VEEVEVAEVKNARVSLTGEKTKPMKLAEVTSINVNRTKTEMEEFNRVLGGGVVPGSLVLIGGDPGIGKSTLLLQVSTQLSQVGTVLYISGEESAQQIKLRAERLGDIDSEFYLYAETNMQSVRAEVERIQPDFLIIDSIQTIMSPEISGVQGSVSQVREVTAELMQLAKTNNIAIFIVGHVTKEGTLAGPRMLEHMVDTVLYFEGERHHTFRILRAVKNRFGSTNEIGIFEMQSGGLVEVLNPSQVFLEERLDGATGSSIVVTMEGTRPILAEVQALVTPTMFGNAKRTTTGLDFNRASLIMAVLEKRAGLLLQNQDAYLKSAGGVKLDEPAIDLAVAVAIASSYKDKPTNPQECFVGELGLTGEIRRVNRIEQRINEAAKLGFTKIYVPKNSLTGITLPKEIQVIGVTTIQEVLKKVFA

SEQ ID NO: 603 - protein, 77 aa, Streptococcus pneumoniae
MGVSIFLALFYMIPALYFLFRIGKKWELPKKVLILSLLGGMFLSGWLSSFANTYIHDFMNCTPKVRQKKSNFWGVLL

SEQ ID NO: 604 - protein, 178 aa, Streptococcus pneumoniae
MKLSYEDKVQIYELRKQGQSFKQLSKRFGVDVSGLKYMVKLIDRYGIEIVKKGKNRHYSSKLKQEMMDKALLEGCSQRSISLDYALPNQGMLSFWPAQYKKNGYTIVEKTRGRPAKMGRKRKKTWEEMTELERLQEENERLRTEVAYLKKLKELEERDEALERERQRQLEKWFQEDFD

SEQ ID NO: 605 - protein, 279 aa, Streptococcus pneumoniae
MVSGGFRLDFLLETARLARSTYYYQLKQLDGVDKDKEIKTEIQGIDNEHKGNYGYRRIHLELRNRGFVVNHKKVQRLMRILGLTARIRRKRKYSSYQGEIGKKAENLIQRQFEASRPMEKCYTDVTEFAIPNSTQKLYLSPVLDGFNSEIIAYHLSTSPNLEQVKSMLEQAFTEKYYENTILHSDQGWQYQHDSYHRFLESKGIQASMSRKGNSPDNSMMESFFGILKSEMFYGYEKNFRSLENLEQAIVDYIDYYNNKRIKVKLKGLSSVQYRTKSFG

SEQ ID NO: 606 - protein, 60 aa, Streptococcus pneumoniae
VNIATLQNGHILGWQIQHIANKLTSNFWIAKDFLSYQVIGWANARMTYSHISSLFIISQF

SEQ ID NO: 607 - protein, 65 aa, Streptococcus pneumoniae
VSITFSLTNFFKILINLTAQVSPQVIDEKILMMDLNLNNYLSTVIQLRQDVYTGIKILHRVRHGE

SEQ ID NO: 608 - protein, 55 aa, Streptococcus pneumoniae
MSRYSYSLDSRKIVFEISCFKEKKASLTLFFHLFESSIMKLATQPSYSSFYSELK

SEQ ID NO: 609 - protein, 138 aa, Streptococcus pneumoniae
MKIKEQTRKLAAGCSKHCFEVVDRTDEVSSKHRFEVADRTDEVSSKHRFEVADRTDEVSSKHRFEVADRTDEVSSKHRFEVADRTDEVSSKHRFEVADRTDEVSSKHRFEVADRTDEVSNIYLRQGDVDVVEEIFEEY

SEQ ID NO: 610 - protein, 75 aa, Streptococcus pneumoniae
MKPGAEGWKDERSQDIEEKDNGDGLGYFLFLSMDNRRCRCNGRTPTDRRTYSNQGSQFCIQGKEALEEVGNNQGY

SEQ ID NO: 611 - protein, 43 aa, Streptococcus pneumoniae
LPNCEDLRDIETKTKQDNGILEQFLGTKGQSNIQLFIRREKGM

SEQ ID NO: 612 - protein, 37 aa, Streptococcus pneumoniae; identical to SEQ ID NO: 82

SEQ ID NO: 613 - protein, 41 aa, Streptococcus pneumoniae; identical to SEQ ID NO: 83

SEQ ID NO: 614 - protein, 77 aa, Streptococcus pneumoniae
  misc_feature 69...71: Xaa is any amino acid
MTYEYKSHIYLAETVLNVKDLASQTTFYQQVIGLEILSQTETESILGLGGKVLVQLIQAQESGEVREHXXXFHSLIN

SEQ ID NO: 615 - protein, 86 aa, Streptococcus pneumoniae
MVSNLVFIGNCNFHNTVIFHLLNRLNQGPLQILSQNHDKGRRLSWIFKSRLGQLNASKNWMGRKEQAMALAIAADLQDQLLFKKAD

SEQ ID NO: 616 - protein, 1009 aa, Streptococcus pneumoniae
MKFNPNQRYTRWSIRRLSVGVASVVVASGFFVLVGQPSSVRADGLNPTPGQVLPEETSGTKEGDLSEKPGDTVLTQAKPEGVTGNTNSLPTPTERTEVSEETSPSSLDTLFEKDEEAQKNPELTDVLKETVDTADVDGTQASPAETTPEQVKGGVKENTKDSIDVPAAYLEKAEGKGPFTAGVNQVIPYELFAGDGMLTRLLLKASDNAPWSDNGTAKNPALPPLEGLTKGKYFYEVDLNGNTVGKQGQALIDQLRANGTQTYKATVKVYGNKDGKADLTNLVATKNVDININGLVAKETVEKAVKDNVKDSIDVPAAYLEKAKGEGPFTAGVNHVIPYELFAGDGMLTRLLLKASDKAPWSDNGEAKNPALSPLGENVKTKGQYFYQVALDGNVAGKEKQALIDQFRANGTQTYSATVNVYGNKDGKPDLDNIVATKKVTININGLISKETVQKAVADNVKDSIDVPAAYLEKAKGEGPFTAGVNHVIPYELFAGDGMLTRLLLKASDKAPWSDNGDAKNPALSPLGENVKTKGQYFYQLALDGNVAGKEKQALIDQFRANGTQTYSATVNVYGNKDGKPDLDNIVATKKVTININGLISKETVQKAVADNVKDSIDVPAAYLEKAKGEGPFTAGVNHVIPYELFAGDGMLTRLLLKASDKAPWSDNGDAKNPALSPLGENVKTKGQYFYQLALDGNVAGKEKQALIDQFRANGTQTYSATVNVYGNKDGKPDLDNIVATKKVTININGLISKETVQKAVADNVKDSIDVPAAYLEKAKGEGPFTAGVNHVIPYELFAGDGMLTRLLLKASDKAPWSDNGEAKNPALSPLGENVKTKGQYFYQVALDGNVAGKEKQALIDQFRANGTQTYSATVNVYGNKDGKPDLDNIVATKKVTIKINVKETSDTANGSLSPSNSGSGVTPMNHNHATGTTDSMPADTMTSSTNTMAGENMAASANKMSDTMMSEDKAMLPNTGETQTSMASIGFLGLALAGLLGGLGLKNKKEEN

SEQ ID NO: 617 - protein, 73 aa, Streptococcus pneumoniae
MSLQIKLKKLAKELSKLLKDSNLETVDKDVLENSQKELQKAVLFLADEKGSEHTEAEVIDNLKEVIAKLKANA

SEQ ID NO: 618 - protein, 39 aa, Streptococcus pneumoniae
VGRFFGSSQTSDEFFFSFDSSIVKELSEIVHGFDTVSFR

SEQ ID NO: 619 - protein, 85 aa, Streptococcus pneumoniae
MKIKEQTRKLAAGCSKHCFEVADRTDEVSSKHCFKVVDGTDEVSSKHCFEVVDRTDEVSSKHCFEVVDRTDEVSNHIRQGDVDVV

SEQ ID NO: 620 - protein, 85 aa, Streptococcus pneumoniae
MNDDDSRCIHIERDGKTIEFGYLNISSTDRNTSHADGLVGIFNSNFSGVRVRGIAVFLNGPDNLDTTLVGNFQTIWNFRIICIHS

SEQ ID NO: 621 - protein, 46 aa, Streptococcus pneumoniae; identical to SEQ ID NO: 79

SEQ ID NO: 622 - protein, 43 aa, Streptococcus pneumoniae
MSCNCAFYRSQFFDVNSVSNYHSHQKELRFPNSILFTYFVKVA

SEQ ID NO: 623 - protein, 139 aa, Streptococcus pneumoniae
MSKEKVILAYSGGLDTSVAITWLKKDYDVVAVCMDVGEGKDLDFIHDKALKVGAVESYVIDVKDEFATDYVLVALQSHAYYEQKYPLVSALSRPLISKKLVEIAHQIGATTIAHGCTGKGNDQVEYQIAVAKKANEAKK

SEQ ID NO: 624 - protein, 287 aa, Streptococcus pneumoniae
MRYDFGKVYKEIRESKGLTQEEVCGGVLSRTSLSKIESGKTTPKYENMEFLLRQINMSFEEFEYICQLYQPSQRTEIMQTYLNMRSIIGTSDLVNLFQKCQDYLKTHHDLPIEEIRDMLEVVIYIRQHGAGELSDHAEQVVKKLWRKIEKQDTWYESDLKILNTILFSFPIEYLHLITGKILQRLEVYKNYQHLYDLRIAILLNLSTLYLYNQDKNMCKQICYTLLEDAKNKKSYDRLAICYVRIGICTDDSKLIQKGFSLLELTEETSMLSHLKKEVEIYYQAKER

SEQ ID NO: 625 - protein, 78 aa, Streptococcus pneumoniae
MKIREIIGTDMYGTTVSGIVSGLNKLNFTVKAVRVALEDLTPKLTFPAILQVKNDLGQNHFVVLHSIKEKINGTRITK

SEQ ID NO: 626 - protein, 123 aa, Streptococcus pneumoniae; identical to SEQ ID NO: 100

SEQ ID NO: 627 - protein, 41 aa, Streptococcus pneumoniae
MATITNALNIAATVAEVFSLGGAIAYGLDIVDGKFDGYLWA

SEQ ID NO: 628 - protein, 352 aa, Streptococcus pneumoniae
MKDDQKYLLAGLYSLLVAIFYFPLIESKGIFVSILMAVLLLYLIYFIATVIHIVIIKFIRKKSFKYLVLYPFTYDGSWRFQPINLLYFPEMVRDVIPINLVQEYCQGQPYGLLKKMLKRIRLSREIALLLATIIVYFFTHRILPLSVFTFMFSYILLFVQSYLGSNTAWIGNRRLIIDDEFEKILLSKSYIKEISSARYSEYLTCEYKNPTPIILIAIFENLLDSYLLQNQSEVDLDIFYKVLPLLYKEKYTMGFNYFVSLNYLLYKVGFLGIIYDNEALRDLSKQYLNKNISELQDGSFEGGIQDAVASKQIVVINEFIACLNSKCMPSQYDRFFYKDRPYIFSRKSSIKG

SEQ ID NO: 629 - protein, 325 aa, Streptococcus pneumoniae
MKNKRYFFDTILIILLLISTIFCVSPVFIKLDILGTPSHAILTFVLAIPLFYILSQCLHTLLLLVSSIFCKLRPIYFYFIFVIIIGARKYYRILFHQLMGFSPGIAVFYKESQTTKNLFKFYYFLYFTTLISYYFFFTFVYDKSLLLPLIPFSIIIALVQKLYRIENQQLFLLKSKVLTILESKRDCEFNLQDYHEIWKLQSKSELPCVALSYISLIKPYLSESVREQIDLLEVKRFKKINHPISLYGMLDVIKLNLYLRHYNEKNKYESMLNKILEVRPDFVLIEQNIDDSLNSSQPLSLSLAISEIQLLLEVYIGIKHVSIRR

SEQ ID NO: 630 - protein, 300 aa, Streptococcus pneumoniae
MIRKPIIFLLMLPIWGLWIELHLLVSNLQLNLEIPFDFVVSTSLTFFVLILSKIVLDILYALKDLYKKEALITIFPFIFIGRKKVNVRFSPYFSFHRKSLSPDDLRSRIIWSFILEIAIILVFILKIPFAIIMLTTIFFWTIMDINHLVFNKTEFLFNQNKWQKEDSFESDLTKTLKDKIQKSELSYSDLMSLQLYDAMNQSTFLTDSELFEDILKKIEDSHNTLLCTGLVELLLYEISISNNNNWQEKVDKIRIQLIRINQLDFFYYTSWLRQNFDFCMNREYHKMKSRKLLLSNKKIV

SEQ ID NO: 631 - protein, 110 aa, Streptococcus pneumoniae
MELVLPNNYVVIDEEEMMYFDGGAYLSKRACQGICAALAMSSGTFIALAGAAVLTKKLINYIKVGGLGGWLIGAAAGKIAYYIGYGVLNRGCDINGNPYPWDGFISATVR

SEQ ID NO: 632 - protein, 242 aa, Streptococcus pneumoniae
MSNVDKIRKIHIIVCWVYIFLSFRAIINDTEYFLLIFLAFIYSIVSLPLYSVKNKIVSICLAINSILLMSFPILINKFFPESFLTYTVLISVFITELIIFHLIGKDFDIKLTNEYKKISQFRSKVSQSPWIKYLEISSFILTIFPSILYGTVDNHVLTLIFLIKICVDTTIKFLFIRLFDTSTLMKRRIFFLFALDVIAYLFLGYLLVIQKAGYLFSVLLLFSNFSVPFIKEKEYELFKNSK

SEQ ID NO: 633 - protein, 42 aa, Streptococcus pneumoniae
LFNEIKKTSSLIGNVFIGMKEDDAMFKKRIEKGKSSVFIFLE

SEQ ID NO: 634 - protein, 609 aa, Streptococcus pneumoniae
MNKKKMILTSLASVAILGAGFVTSQPTFVRAEEAPVASQSKAEKDYDTAKRDAENAKKALEEAKRAQKKYEDDQKKTEEKAKEEKQASEAEQKANLQYQLKLREYIQKTGDRSKIQKEMEEAEKKHKNAKAEFDKVRGKVIPSAEELKETRRKAEEAKAKEAELTKKVEEAEKKVTEAKQKLDAERAKEVALQAKIAELENQVHRLETELKEIDESDSEDYVKEGLRVPLQSELDVKQAKLSKLEELSDKIDELDAEIAKLEKDVEDFKNSDGEYSALYLEAAEKDLVAKKAELEKTEADLKKAVNEPEKPAEEPENPAPAPKPAPAPQPEKPAPAPAPKPEKSADQQAEEDYARRSEEEYNRLTQQQPPKAEKPAPAPVPKPEQPAPAPKTGWKQENGMWYFYNTDGSMATGWLQNNGSWYYLNSNGAMATGWLQYNGSWYYLNANGAMATGWAKVNGSWYYLNANGAMATGWLQYNGSWYYLNASGAMATGWAKVNGSWYYLNANGSMATGWLQYNGSWYYLNANGAMATGWAKVNGSWYYLNANGSMATGWVKDGDTWYYLEASGAMKASQWFKVSDKWYYVNGLGALAVNTTVDGYEVNANGEWV

SEQ ID NO: 635 - protein, 38 aa, Streptococcus pneumoniae
LKKRMNRWQFLLNQSKEMVGILLLKMKEQELIEFVVNL

SEQ ID NO: 636 - protein, 40 aa, Streptococcus pneumoniae; identical to SEQ ID NO: 109

SEQ ID NO: 637 - protein, 253 aa, Streptococcus pneumoniae
MTYNEKRLTNSLERVHMEQLKNTTDLLGLEDKNIKILSVLKYQTHLVVQAKLDSPAPPCPHCQGKMIKYDFQKASKIPLLDCQGLPTVLHLKKRRFQCKNCLKVVVSQTSIVKKNCQISNMVRQKIAQLLLEKQSMTEIAHRLAVSTSTVIRKLREFKFETDWTKLPKVMSWDEYSFKKSKMSFIAQDFESKSILAILDGRTHAVIRNHFQRYQREVRELVEVITMDMYSPYYRLAKQLFPKAKIVLDRFHIV

SEQ ID NO: 638 - protein, 67 aa, Streptococcus pneumoniae; identical to SEQ ID NO: 111

SEQ ID NO: 639 - protein, 281 aa, Streptococcus pneumoniae
MRFYCEAYEVITEEKKVYFNDIELEVKYSSVEELFIICEKLLDKKKVSFFYVDEKPLRYLLFDYIFLLVLAKKNIPILDGVSNKQVDPTLLHHFSLEIEKNFIDFCYKNMDLILKTQSISLCHREELIIVDVSDDSKFGVFYKRFRTLVDKNNGKYVCVYNFSRVSDILQNWKNYCNRKFSVTFTESQFELFKLLYNQKNFKTISLLFGKKIVAGGIIYYSDLTNIEYFCIFWWDSMFGKDSIGKYVYVEEISRCHFLDRNYSFCYGLQDYKSKLIKYFLE

SEQ ID NO: 640 - protein, 499 aa, Streptococcus pneumoniae
METRNLISYSLTDIFETDKIRIELLGEIYYKNIKLELHEFAGLYKIYGISLIKNITGMFLIIIFDTKTKELKIFQDITTSYFNLYYTVYGGVFYYSTSLKKVMKLSHVPVTLNNKKIQEFMRNGFILDSNTLVTEINKLEYFSYISVNNTLRICGIDYNDSNNFTKEQVLKNWDSMLRESILRVYSEAGEANITLSSGFDSNYILYTLANYTNSSINAFCIGGEKGINEIPEVTKIAKFYGINLLVDTVMSQDLEYFPDIVWRLEGSLFECGVILQYYLGRLLFQKGNTSILCGESADEIMTFKYHSVNYNQFCNDKQKSVYFSYSDYPFYVTNSIVLKKNSLLLHSFGIHPRYPYKMSEIVEMSKKISDLNDKKEFHKKNCELRFQDSVLDNINSVPGTTHLFSCLNIQTLVKIILYIFRYNSCMKIFNFRDKELIFFNKIVNGLIQNIEENLEDDIERILKYLYICLFNEIFIIKNKVNFFDDVEFNQTLSEFLDKL

SEQ ID NO: 641 - protein, 340 aa, Streptococcus pneumoniae
MKFFCENNLNITFFDTFSEIKNNIDYYIIALPTDYDEKIGSFNTYEIEQTVSKILRVKPNGKIILKSTVPIGFSNKLKRLFDTKNIIFVPEFLREGCSIYDNLYPSRIVVGDETVEGRKIAELFLSISTHSTANIKNVMLVSPTEAEAIKLFSNTFLALRVAFFNELDSFAERRSLNAEVVIKGVCLDPRIGNFYNNPSFGFGGYCLPKDTKQLKKEFIEINAPVIEAIDISNTNRKQFIVKQILERKPKIVGIYKLGMKYNSDNYKESAILSIINELLIVGIKILVYEPNLNVSIDNVIFEKNFELFTKQSDLIVANRWDRGLEAYKDKVYTRGIWIRD

SEQ ID NO: 642 - protein, 41 aa, Streptococcus pneumoniae
LEEESFIMENTEFSLELDVTEVATEQDYVSSGVTSTGCCKN

SEQ ID NO: 643 - protein, 971 aa, Streptococcus pneumoniae
MFKIKDNYIYRQCVNDSILIEKLNENNLEIFFDSKIFQEMLMVANPRFFNELTKEKIYQNSTFRNYAKRSLTRATPFGLFSSVGVGSFSKVSYPQQIRENYSKKVSVSGEWISSLCMMLENEDSVLLQLHLQWNQKVLELSDKYQLNNINYWGVSEQSRDILIKKTALLEFIKKLTYKSEVSVLDLVQEIQTKSPNLETQKIIDYLRNLIISEFLFTNLRKVVINHNCLDNLIYILSSINEQTKLTTDLLQLKSCIEKYSKSELGEGILQYAEICEKMSHIFNEEKQRYLKVDLVNSYDSLLPKDLKKTLEDFVNFISRINLGKDYRNKELISYTEKFVEKYGEYVEVPIKQLLDSKLGLGIPKQNLEPYSILSSVAEQTFLSYLSKEIFKAVKNNKKEIDISNIPPELLYPNLDRFAVNQFELYCEMKNFGEQPVISIVPNTGSDMIGKSIGRFASYFLNSNIELDSRVDNVELIEFPSDNKNLNVMSSHHGHSKKLLLSYEDDFDIDSLELDFLVVGVERVNEHYKLYFRDLRTDLIVNFVTTSMLNHKSIGVFSHLARFLLTVSLEWQDNPFSLFRVIENLDFLPYIPRIKYKNIILSEEKWILSDVDKKDMSTISQWKKFFDVPSLLYFHKDDERLLIDLKNSLDVQWILKQNVDKLHFTRFDKIDGKNCEFIFGFENPRNSVYPHSVSEKTVRRIENDFYKDYVKTFSSDWIYFKLYGINSSTMPELRENLLIFTDELLAEKLVSDFHFVNYNDGGDGSIRLRFKIMNEDDFEKLRYRIIHWIDFLLNHYFCKDVSFNLYEREVERYGGIGFLTVCERIFSIDSYLVLKLFSKKVLKVDDYLSVLHSIFIYIRLLGISPKQLLKLMKDTFTQNIYRKSFKKVFPNNAKVIKEFKQYFEDQSKFDIFNEVFKSFSPIEKHFEYKNDMIHSLLHMHMNRIGIFSLNEKEYLYFVRYILEVLNNYEKYN

SEQ ID NO: 644 - protein, 425 aa, Streptococcus pneumoniae
MRNIIKKYDEIINKVDSLVLDNNIIDLLQRSCYTENRSYLSEYPSIIIYLSYRLANCDDNEHSKLLYNRVNYYLHELLKSIKLNSRNNISMCYGFSGYVYALKLLPKRSKEYSKLLETLETILVSLTRDRLSEIKKSNKVKEEYIDVIQGVSSVGKYFLSKDKLTSNQELLLKGVLNYLAGVINNKPTIYPEYMPNEKLKRKFPNGYINLGVAHGILGPLYVLALGFKKFNMPEYLISLKKGLSYYEKTFQTNKIGKIIGWNGRVSAEVESEKFEYNLSWCYGSLGMARVLYNISKIIDIPKLQELATDVFHSSIYYLNSSEILNNAICHGRSGIMLLFNLMYLDTGESQFKAISDNLFKEIVNKATDSEYIFVERDIYFRGVNYDEVIEYIDFCLLNGVSGIVLALMAQRTGNASPLAEMFFMQ

SEQ ID NO: 645 - protein, 418 aa, Streptococcus pneumoniae
MKKILNNKLYMKVLVSDLISNFGDTLYFIALMTYVTEIKSSNLAISIVNISETIPILFTIFFGIIADRTLNKVGMIIKTLWIRTILYLLVAVVMNFKESILVVILASIVNLISDTLGQFENGLFYPISNRIVKKSDREETMAFRQTATSTMNIVNQSLGAFLITFLSFFHLALINSLTFAISLLITLAIKSQINNFYIDKTPSTKVSKVDFKATFSDIISNLKLSLKHLFSLTNMKTVLLVIPILNGSLAIIIPLAVVNLSKSSALTIISSATTISVLGISTVSGGILGGTLILISKKFKNLSIENLLKMNLMTILLSFIAFYYQNIYFIVLTLFLSSVFVSALNPKIGAIIFNNLDETKLATIFGGMVTYFQLGDVVSRLLFSTLVIYLSYTYIAVIYMILVLIVAIYTFRRVQTTS

SEQ ID NO: 646 - protein, 64 aa, Streptococcus pneumoniae
MKIKEQTRKLAAGCSKHCFEVVDRTDEVSSKHCFEVVDRTDEVSNHTYGKVKLTWFEESFEEYK

SEQ ID NO: 647 - protein, 37 aa, Streptococcus pneumoniae
LKSSILSKMGDFSVRYCNLVGTVLFGVVLIAILRLVF

SEQ ID NO: 648 - protein, 123 aa, Streptococcus pneumoniae
  misc_feature 117...118: Xaa is any amino acid
MGLDVGSKTVGVAISDPLGFTAQGLEIIQINEEQGQFGFDRVKELVDTYKVERFVVGLPKNMNNTSGPRVEASQAYGAKLEEFFGLPVDYQDERLTTVAAERMLIEQADISRNKRKXXIPFIN

SEQ ID NO: 649 - protein, 38 aa, Streptococcus pneumoniae; identical to SEQ ID NO: 115

SEQ ID NO: 650 - protein, 330 aa, Streptococcus pneumoniae
MLIGEGYRTFPVLIYTQFISEVGGNSAFAIMAIIIALAIFLIQKHIANRYSFSMNLLHPIEPKKTTKGKMAAIYATVYGIIFISVLPQIYLIYTSFLKTSGMVFVKGYSPNSYKVAFNRMGSAIFNTIRIPLIALVLVVLFATFISYLAVRKRNLFTNLIDSLSMVPYIVPGTVLGIAFISSFNTGLFGSGFLMITGTAFILIMSLSVRRLPYTIRSSVASLQQIAPSIEEAAESLGSSRLNIFAKITTPMMLSGIISGAILSWVTMISKLSTSILLYNVKTRTMTVAIYTEILRGNYGVAAALSTILTVLTVGSLLLFMKISKSNSITL

SEQ ID NO: 651 - protein, 43 aa, Streptococcus pneumoniae
LIIIASMSAPFVGAYSWVLLLGRNEVITKFLTNALYLPAIDIY

SEQ ID NO: 652 - protein, 55 aa, Streptococcus pneumoniae
MERKKLNIWTVSSFFLFLTYPIFLVYPIVTVLKQALIHEGQFSLANFVTFFSKAY

SEQ ID NO: 653 - protein, 101 aa, Streptococcus pneumoniae
LLSTTEFIGLSIRILSNLHEFKILVGLLNQFFFWNLLLHKTKSNVVSDSQMWENSVVLENHPDIAFAGFHIIDFCIIEVKFSTFDTVETCNHTKKGRFPTS

SEQ ID NO: 654 - protein, 138 aa, Streptococcus pneumoniae
MITIKKQEIVKLEDVLHLYQAVGWTNYTHQPEMLEQALSHSLVIYLALDGDAVVGLIRLVGDGFSSVLVQDLIVLPIYQRQGIGSALMKEALEDYKDAYQVQLVTEETERTLGFYRSMGFEILSTYNCIGMTWMNRKK

SEQ ID NO: 655 - protein, 64 aa, Streptococcus pneumoniae
MKIKEQTRKLAAGCSKQCFEVVDRTNEVSNHTYGKATLTWFEEIFEEYNTNLEYKQPICSQEKA

SEQ ID NO: 656 - protein, 56 aa, Streptococcus pneumoniae
MVDNIPKRVNDVIRQAGNNAKTSRPHVGIGKSHISVSFLFPYHTANRIKNQEKVIF

SEQ ID NO: 657 - protein, 75 aa, Streptococcus pneumoniae
LFDLLDHGLDTVLVCHVTDISMGLDANFTISFNPFIDQILIDIVKDNSSAGFSVGFGNSKSNSIRSAGDESNFSF

SEQ ID NO: 658 - protein, 111 aa, Streptococcus pneumoniae
MKSLARLLIIHVFISIFLFFALTSGAISHTVLLLLLLFLPALNKGLEKIQSKRIPVLNAALFFLLISFPQLLTNPVQWKFSIFLVVTIISSLAYFYNFYQVVKEVDQKQLI

SEQ ID NO: 659 - protein, 63 aa, Streptococcus pneumoniae
LEAAGEIETEFQGWIVLVVFNHIDSLSRDTDILGEFELGNTQFLAKFFHTIHLISFLIYVVYI

SEQ ID NO: 660 - protein, 136 aa, Streptococcus pneumoniae
MEGVNHVDIIKVSCCSFISQVNWMMKGKIPNREGFKFSVARFDAIDLVVVHIGHTRCQFSRTGSRSGYDNQVATGFDVVVFAHAFWGNDVIHIRRISFDWIMKIRINSVFLKLVAEGICSGLASVLCNDNGTNKNP

SEQ ID NO: 661 - protein, 41 aa, Streptococcus pneumoniae; identical to SEQ ID NO: 128

SEQ ID NO: 662 - protein, 243 aa, Streptococcus pneumoniae
MIDIHSHIVFDVDDGPKSREESKALLIESYRQGVRTIVSTSHRRKGMFETPEEKIAENFLQVREIAKEVADDLVIAYGAEIYYTLDALEKLEKKEIPTLNDSRYALIEFSMHTSYRQIHTGLSNILMLGITPVIAHIERYDALENNEKRVRELIDMGCYTQINSYHVSKPKFFGEKYKFMKKRARYFLERDLVHVVASDMHNLDSRPPYMQQAYDIIAKKYGAKKAKELFVDNPRKIIMDQLI

SEQ ID NO: 663 - protein, 230 aa, Streptococcus pneumoniae
MKEQNTLEIDVLQLSRALWKRKLVILLVAIITSSVAFAYSTFVIKPEFTSTTRIYVVNRDQGEKSGLTNQDLQAGSYLVKDYREIILSQDVLEEVVSDLKLDLTPKGLANKIKVTVPVDTRIVSVSVNDRVPEEASRIANSLREVAAQKIISITRVSDVTTLEEARPAISPSSPNIKRNTLIGFLAGVSGTSVIVFLLEFLNTRVKRPEDIENTLQMTLLGVVPNLSKLK

SEQ ID NO: 664 - protein, 455 aa, Streptococcus pneumoniae
MDKKGLEIFLAVLQSIIVILLVYFLSFVRETELERSSMVILYLLHFFVFYFSSYGNKFFKRGYLVEFNSTIRYIFFFAIAISVLNFFIAERFSISRRGMVYFLTLEGISLYLLNFLVKKYWKHVFFNPKNSKKILLLTVTENIEKVLDKLLESDELSWKLVAVSVLDKSDFQHDKIPVIEKEKIIEFATHEVVDEVFVDLPGESYDIGEIISKFETMGIDVTVNLNAFNKNLGRNKQIHEIVGLNVVTFSTNFYKTSHVISKRILDICGATIGLILFAIASLVLVPLIRKDGGPAIFAQTRIGKNGRHFTFYKFRSMRIDAEAIKEQLMDQNTMRGGMFKMDNDPRVTKIGRFIRKTSLDELPQFWNVFIGDMSLVGTRPPTVDEYDQYTPEQKRRLSFKPGITGLWQVSGRSKITDFDDVVKLDVAYIDNWTIWKDIEILLKTVKVVFMRNGAK

SEQ ID NO: 665 - protein, 119 aa, Streptococcus pneumoniae
VTFDKEDARSILENEIFYPCYYPTNRNLKNLIKNTILAFKILRKERPDIIVSSGAAVAVPFFYLGKIFGAKTVYIEVFDRIDAPTMTGKLVYPVTDRFIVQWEEMKKVYPKAINLGGIF

SEQ ID NO: 666 - protein, 167 aa, Streptococcus pneumoniae
MIFVTVGTHEQQFNRLIKEVDRLKGEGFIQDDVFIQTGYSNYVPKFCKWEKVISYEKMNQLIKESDIIITHGGPATFMAVIAKGKNPIIVPRLKKFGEHVNDHQMQFVKITKEIYNLIVIDDISDLHLILHNFKDKHFETYLNNERFNVRFNVEISNLFKGNKINEN

SEQ ID NO: 667 - protein, 390 aa, Streptococcus pneumoniae
MKIRIEPQYFLYKYLWFIILLPKQFMQLILFFLIALTLLPTYIKEKQVFKIDTPSFCMVLWTIIYSISIIFNSLIDGLAVQVIFSDLSKAFNWLIAVFFYNYYLKMPINIDRIKRYMYYNFTILVVFVGLFYIQRGSNVILFGRSLLDWDGFTLATSYGVRYTGFLEYATLNGQLILFLLPLIRLFRFRFFTQTIIFAFLLEVLVLSKSRIAIVAMLIYIAFAVVNEINSNNKWLIGIFCPIIPFMLFYNFEKIKQIFFQMFSSRSGSNATRFRVYEESLKAINGMEMLLGAGVRIPSTVDILLGSHSMYISFIYRTGVLGSIIITVMFYYLFSKFLKCDSSERLRSIGYILALSVFWLFEELDPHYWCLILFFSTISIFINNRKEEIVG

SEQ ID NO: 668 - protein, 339 aa, Streptococcus pneumoniae
MIEVSIIIPIYNAEKTIKNCVDSALKQNLESLEVILVNDGSNDSTSKILEQYGDNPQVMIFHQVNMGVSAARNVGLSYASGEYVFFLDSDDILDEGMLSKMYQFAKSNKIDLLSCWHKEPSTTQYGGNDNSSASFIARTKEEIGNHFVDIFPRSACAKLFLRRRIEENNIAFSTEMSLGEDMSFVCQYLMVSRSIAVIDGLYYTIQNVNPQSLSKRYVSNIENSLLMQNQLWDQLLEVYPKIEENYYKQHMDFRFYLASLYVNNLFKFDSPYSSKEKWDNIAQQLKKYRPFLDEKVSKEKKPKNMNEMVIFYLLKSKIPALIYSFYSFKEWWKKKRLKN

SEQ ID NO: 669 - protein, 318 aa, Streptococcus pneumoniae
MEDLVSIVVPVYNVEKYLKKSIESILNQTYDNLEVLLVDDGSTDSSGEICDSFIKVDSRIRVFHKENGGLSDARNFGIEHMKGQYVSFIDGDDYISKDYVWKLYHSLKNNNSEVSICSFSLVDETGEKIKDELLDSGEVSLSGQQILEKALTADGYRYVVAWNKLYRSTLFEKLKFKKGMLYEDEFLNYPLFWDCKRVSIVEEPLYLYVQRKGSIIQSNMTLEKIKMKDKMHTSRIEFYAEKKNSFLHQRSCQQYCNWIVTITVSHYNVLNVAFLKYLQHQFRRIVKYTQNDDKKLIIQNILGYINIRLAAYVKSKVM

SEQ ID NO: 670 - protein, 282 aa, Streptococcus pneumoniae
MFPIYIISNQNIAFQQEIDIAYRKMKRQFSHISLTESEQKNDMNISNKVWICWFQGEERPPELIRTCIQSMRTHFLGREIIVLTEENISDYIDIPDYITDKYKKGSISRAHYSDILRVELLCRYGGLWVDVTVLNTGGDFSNLELPLFVYKSLDLSRKDSQAIVASSWLISSYSNHPILLYARKLLWEYWRRKNSLCNYFLFHIFFTIATELYPIEWSAVLTFNNHSPHMFNFELNNQFSEKRWEQLKQISVFHKLNHHIDYSIGVNNFYKFIVFSKVEKNE

SEQ ID NO: 671 - protein, 487 aa, Streptococcus pneumoniae
MSNKISKNLAYNIGYQLIGIAFPLITSPYLSRILGAENLGIHSFTISVALYFMMFMLLGIANYGNRTIATVKREGKEILSKTFWNIYYVQLLMSVLVTIAYLIYLYFWVSSYKFIAILQLFLLLSNAVDITWLFYGLEDFKQIVFRNTLVKLLGLFLIFSFVHESSDLWKYTLINGGVTLVGQLLLWGQLKGRLSWVKIQKKDLLSHIKPILVLFIPVLAISIFSNMDKYMLGLMVGVKQVGFYDNANRIIDIPKALIAALEAVMLPRTSYLLAEGQEEKSNYYIEVTILYAMMISSVLIFGIISVSDIFSLVFWGEEFLESGRLIAAMAPVFVFSVPGNIIRTQYLIPRAKDKDYVLSLIIGALVNILLNCFLIKPFGAMGATISTVLAEFVLYGVQFWTVRRDLDFKKYLKNGFIFYLFGMIMYLAIIAVKAHLQYNIINLVLLIVLGGIVYTGFCCFYILISRNVHFEILREKIKRKIGYENIL

SEQ ID NO: 672 - protein, 73 aa, Streptococcus pneumoniae
MFVADIMISDYSSAPIDFLLLNRVVFLYLPDFKEYQSDKNPFFEVFKVSKTKGIALDPFDEIIGRFQFGVRIV

SEQ ID NO: 673 - protein, 183 aa, Streptococcus pneumoniae
MLLKKKHKKPVTQVNRDKSPPSVWGDILYLVSKLLMVGFVLAILYFFVFGLLRYNDDGMKPALKDGDLVVYYRLDKRYSIGDLLVYSYKGKERVARVIATEGSTIDINENGLIINGSPQQEQDIYKETLLYKEGATFPMKVPAGQLFVLGDNRTTAVDSRAFGTIPIQDTQGKVVTVIRRRGF

SEQ ID NO: 674 - protein, 37 aa, Streptococcus pneumoniae
MGFSMKLIHDLNTHTTHSTAKMLYNVKAIKNDFSIRE

SEQ ID NO: 675 - protein, 172 aa, Streptococcus pneumoniae
MEQLHFITKLLDIKDTNTQIIDVVNRDSHKEIIAKLDYDAPSCPECGSQMKKYDFQKPSKIPYLETTGMPTRILLRKRRFKCYHCSKMMVAETPLVKKNHQIPRIINQKIAQKLIEKISMTDIAHQLSISTSTVIRKLNDFHFECNFRNLPKIMSWDVETVRGVTVSIGRWR

SEQ ID NO: 676 - protein, 333 aa, Streptococcus pneumoniae
MMKTKREKPKKSLSRRLVLAVDGVINHLLLIFAALIFLFGFYALWDSNQVYSLASSSEYEAYRPVTTQQDELASFSGFSKLQELNPEVLGWINVYGTNIDYPLVQAKDNEKYLNKDSKGEFAATGAIFLDARNNPKFEDFNTIIYGHHVENGVMFGDVAKFADQEFFDQHRYGSIYYNGVEKGLEIFEMLEVDAYDFNIYDPGIQGEDRQQAYLDHLLSVAMHKRDISLSPSDRIILLSTCFLDVTNGRHIVVAKITDTVPKNTFHTKKSKPFPYSVFDDSSLGRFLSSIPLWIWYLILFVLFLLLIFLLLVLYLILRRRRESKKNARSRPFY

SEQ ID NO: 677 - protein, 68 aa, Streptococcus pneumoniae; identical to SEQ ID NO: 141

SEQ ID NO: 678 - protein, 38 aa, Streptococcus pneumoniae; identical to SEQ ID NO: 142

SEQ ID NO: 679 - protein, 40 aa, Streptococcus pneumoniae
MYNSQALRQIVVVGSIDHLFKRHSSICEIFGLRKRCLSFL

SEQ ID NO: 680 - protein, 80 aa, Streptococcus pneumoniae
MSLADLLEELEAAKDSKKARSMEAYMRHQFSFLGIAVPERNKLYKNIFQKRKKQRLSIGILQTLAGKRSLENTNMWLLTI

SEQ ID NO: 681 - protein, 58 aa, Streptococcus pneumoniae; identical to SEQ ID NO: 147

SEQ ID NO: 682 - protein, 46 aa, Streptococcus pneumoniae; identical to SEQ ID NO: 179

SEQ ID NO: 683 - protein, 48 aa, Streptococcus pneumoniae
LLGSFFSWTTKELMGIIFFNNFPTVHKNNMMGYISSKTYLIKLIKNSI

SEQ ID NO: 684 - protein, 51 aa, Streptococcus pneumoniae
LKNVFSVGCHFFQFFVRFFWFGKFDHFNLVELVQTDQATRITTGRTSLRTE

SEQ ID NO: 685 - protein, 44 aa, Streptococcus pneumoniae
LIDIKHFFLCLPLSKKMIIDIIVNKNPDRFCMIEKVKKTMAENR

SEQ ID NO: 686 - protein, 57 aa, Streptococcus pneumoniae; identical to SEQ ID NO: 153

SEQ ID NO: 687 - protein, 37 aa, Streptococcus pneumoniae
VNTLYLCSSDSNDFFKYTWGDNDFAKLFFNSHRMTSF

SEQ ID NO: 688 - protein, 65 aa, Streptococcus pneumoniae
VKEEKKAIVLGADNAYMDKVETTIKSLCVHHYNLKFYVFNDDLPREWFQLMEKRLETLNSEIVNV

SEQ ID NO: 689 - protein, 39 aa, Streptococcus pneumoniae
VSNEIKIIALKLSIFWGHNHFRLTGNWKIFYLCLKSGLA

SEQ ID NO: 690 - protein, 485 aa, Streptococcus pneumoniae
MKRIQLNMNETKKYLVIKAIAQGKKTKKRACVELNLSERQINRLLLAYQQKGKEAFRHGHGNRNRKPKHAIPDEIKERVLKKYLSYETYKPNVLHFCELLAEEEGIKLSDTTVRKILYKKNILSPKSHRKTKKRVRKQAKLNLNQPLDNPILPTAKDFLEDPKKVHPSRPRKKFAGELIQMDASPHAWFGPETTNLHLAIDDASGNILGAYFDKQETLNAYYHVLEQILANHGIPLQMKTDKRTVFTYQASNSKKMEDDTYTQFGYACHQLGILLETTSIPQAKGRVERLNQTLQSRLPIELERNNIHTLEDANTFLLSYIQTFNEQFGNKTKLSVFEEAPNPSERNLILARLAERVVDSGHHIRFQNRYYMPVEQGKEVYFIRKTKALVLKAFDGDIYLNIADKIYHTKELLDHELYSKNFEQEPEQKKKDASISLHKPIRGNSHLSNNTFIKIKRIMKSLLVRSFILLNYKYNLFFAKWEAFP

SEQ ID NO: 691 - protein, 37 aa, Streptococcus pneumoniae; identical to SEQ ID NO: 452

SEQ ID NO: 692 - protein, 38 aa, Streptococcus pneumoniae
MGEEEMRNKMIIAVSLVVAGVMTYLMFSGLDEDFYHFP

SEQ ID NO: 693 - protein, 67 aa, Streptococcus pneumoniae
MNTIERTRRLVKGCATHCFEVVDRTDEVSSKHVFEVVDETNEVSSKHVFEVVDETDEVSNHTYGKAT

SEQ ID NO: 694 - protein, 39 aa, Streptococcus pneumoniae
MLSNDFIQLRKDDIKTTSVLYFPIRLFSLETMNMSSQYF

SEQ ID NO: 695 - protein, 141 aa, Streptococcus pneumoniae
LTCYPNPQKRLEAGFDKLIEIKRLTASKIQDILSVAPRSIGTTSPAREFEIIENIKHYKRLIDKAKKCVNDLMAEFNSVITTVTGIENRLGAVILAEIRNIHAFDNPAQLQAFAGLDSSIYQSGQIDLAGRMVKRGSPHLR

SEQ ID NO: 696 - protein, 472 aa, Streptococcus pneumoniae
MKRIQLNMNETKKYLVIKAIAQGKKTKKRACVELNLSERQINRLLLAYQQKGKEAFRHGNRNRKPKHAIPDEIKERILKKYLSYETYKPNVLHFCELLAEEEGIKLSDTTVRKILYKKNILSPKSHRKTKKRVRKQAKLNLNQPLDNPILPTAKDFLEDPKKVHPSRPRKKFSGELIQMDASPHAWFGPETTNLHLAIDDASGNILGAYFDKQETLNAYYHVLEQILANHGIPLQMKTDKRTVFTYQASNSKKMEDDTYTQFGYACHQLGILLETTSIPQAKGRVERLNQTLQSRLPIELERNNIHTLEDANTFLLSYIQTFNEQFGNKTKLSVFEEAPNPSERNLILARLAERVVDSGHHIRFQNRYYMPVEQGKEVYFIRKTKALVLKAFDGDIYLNIADKIYHTKELLDHELYSKNFEQEPEQKKERRKYIPPQTHPWKLTSFKQYLHKNKKDYEEFTSEEIHSPQLQV

SEQ ID NO: 697 - protein, 56 aa, Streptococcus pneumoniae; identical to SEQ ID NO: 159

SEQ ID NO: 698 - protein, 72 aa, Streptococcus pneumoniae
MMSIREQDLKDIGAIIKYKNFHSPFDTFKYLKDMGFDTIDLSVLLEGFSYAYGMDWLEKFFKENQDKLREFY

SEQ ID NO: 699 - protein, 102 aa, Streptococcus pneumoniae; identical to SEQ ID NO: 161

SEQ ID NO: 700 - protein, 83 aa, Streptococcus pneumoniae; identical to SEQ ID NO: 162

SEQ ID NO: 701 - protein, 85 aa, Streptococcus pneumoniae
MKIKEQTRKLAAGCSKQCFEIVDRTDEVSSKHGFEVVDETDEVSNHTYGKAKLTWFEEIFEEYKMMGKAGQLVFFDVYRLVRQVS

SEQ ID NO: 702 - protein, 427 aa, Streptococcus pneumoniae
LVEIVRGGSPRPIKDYLTSEVDGINWIKIGDTEKGEKYINNVKEKIKKSGLNKTRFVKKGTFLLTNSMSFGRPYILNVDGAIHDGWLAISNYENSLNKDYLFYILSSNVVYSQFLSLISGAVVKNLNSDKVASILIPLPPLAEQQRIIEAIESALEKVDEYAESYNRLEQLDKEFPDKLKKSILQYAMQGKLVEQDPNDESVEVLLEKIRAEKQKLFEEGKIKKKDLDISIVSQGDDNSYYEEVPCEIPESWEWVRLNDITSYIQRGKSPKYSNIPIYPVIAQKCNQWSGFSIDLARFIDPETVHSYQKERLLRDGDLMWNSTGLGTLGRLAIYHENKNPYVWAVADSHVTVIRVLSGVINCHFIYNFLSSPIVQSVIEEKASGSTKQKELLTKTIKEYLIPLPPLPEQSRIVDKIEQFFAHIDALI

SEQ ID NO: 703 - protein, 520 aa, Streptococcus pneumoniae
MTPEQLKASILQRAMEGKLVPQNPNDEPASELLKRIKAEKEKLISEGKIKRDKKETEIFRGDDGKHYGKFADGSTQEIDVPYDIPDTWEWVRFSTLVEIVRGGSPRPIKDYLTSEVDGINWIKIGDTEKGEKYINNVKEKIKKSGLNKTRFVKKGTFLLTNSMSFGRPYILNVDGAIHDGWLAISNYENSLNKDYLFYILSSNVVYSQFLSLISGAVVKNLNSDKVASILIPLPPLAEQQRIIEAIESALEKVDEYAESYNRLEQLDKEFPDKLKKSILQYAMQGKLVEQDPNDESVEVLLEKIRAEKQKLFEEGKIKKKDLDISIVSQGDDNSYYGNIPMNWVVIKIKDIFSINTGLSYKKGDLSINKGVRIIRGGNIKPLEFSLLDNDYYIDTQFISSEQVYLKHNQLITPVSTSIEHIGKFARIDKDYDGVVAGGFIFQLTPFESSEIISKFLLFNLSSPLFYKQLKAITKLSGQALYNIPKTTLSELLIPLAPFEEQELITQKVEKLFEKVNQLWK

SEQ ID NO: 704 - protein, 45 aa, Streptococcus pneumoniae
MCKANSRNDIFILQDSFCFEIFSRKKFKIVKEVLPNSTCKFRVVQ

SEQ ID NO: 705 - protein, 48 aa, Streptococcus pneumoniae
VDRTDEVSSKHCFEVVDRTDEVSNHTHDKPTLTWFEEIFEEYHSPFHN

SEQ ID NO: 706 - protein, 40 aa, Streptococcus pneumoniae; identical to SEQ ID NO: 167

SEQ ID NO: 707 - protein, 47 aa, Streptococcus pneumoniae
MGPLLMHLCQQLVWLAKYLKRAGSDMMFLQEFLNRRFNPSLLGKIIL

SEQ ID NO: 708 - protein, 47 aa, Streptococcus pneumoniae
LVAKGQGHKLRVSRHKDNQGIGVLFPNLSSHFQPLHLLISNLNIQKE

SEQ ID NO: 709 - protein, 717 aa, Streptococcus pneumoniae
MTSYKRTFVPQIDARDCGVAALASIAKFYGSDFSLAHLRELAKTNKEGTTALGIVKAADEMGFETRPVQADKTLFDMSDVPYPFIVHVNKEGKLQHYYVVYQTKKDYLIIGDPDPSVKITKMSKERFFSEWTGVAIFLAPKPSYQPHKDKKNGLLSFLPLIFKQKSLIAYIVLSSLLVTIINIGGSYYLQGILDEYIPNQMKSTLGIISVGLVITYILQQVMSFSRDYLLTVLSQRLSIDVILSYIRHIFELPMSFFATRRTGEIISRFTDANSIIDALASTILSLFLDVSILILVGGVLLAQNPNLFLLSLLSIPIYMFIIFSFMKPFEKMNHDVMQSNSMVSSAIIEDINGIETIKSLTSEENRYQNIDSEFVDYLEKSFKLSKYSILQTSLKQGTKLVLNILILWFGAQLVMSSKISIGQLITFNTLFSYFTTPMENIINLQTKLQSAKVANNRLNEVYLVESEFQAPENPVHSHFLMGDIEFDDLSYKYGFGRDTLTDINLTIKQGDKVSLVGVSGSGKTTLAKMIVNFFEPYKGHISINHQDIKNIDKKVLRRHINYLPQQAYIFNGSILENLTLGGNHMISQEDILKACELAEIRQDIERMPMGYQTQLSDGAGLSGGQKQRIALARALLTKAPVLILDEATSGLDVLTEKKVIDNLISLTDKTILFVAHRLSIAERTNRVIVLDQGKIIEVGSHQELMQAQGFYHHLFNK

SEQ ID NO: 710 - protein, 68 aa, Streptococcus pneumoniae
LRIYLHEPLITTVSQDFSSLSDISATHFEQLHIVAIVHSDIQRNNSPLTCDNRLSLHSVKFLFTRIIG

SEQ ID NO: 711 - protein, 60 aa, Streptococcus pneumoniae
MGLIKTLAKIYGNYFLTVQGVKVMKTIKKDDNAVVGLGKLFIADKLMDTARWLIKPEDKK

SEQ ID NO: 712 - protein, 46 aa, Streptococcus pneumoniae
MKFFWGLLAILFIKPIIGIVKFFWMIISFAVQLLFYKILDWFFKLI

SEQ ID NO: 713 - protein, 77 aa, Streptococcus pneumoniae
MKIKEQTRKLAADCSKQCFEVVDRTDEVSSKHRFEVVDRTDEVSNHTYSKVKLTWFEEIFEEYKMILLLILYHMERD

SEQ ID NO: 714 - protein, 55 aa, Streptococcus pneumoniae; identical to SEQ ID NO: 175

SEQ ID NO: 715 - protein, 186 aa, Streptococcus pneumoniae
MARTELPDKIETERLVLRVRTVADAEDIFDYASLPEVAYPAGFPPVKTLEDEIYYLEYIFPERNQKENLPAGYGIVVKGTDKIVGSVDFNHRHEDDVLEIGYTLHPDYWGRGYVPEAARALIDLAFKDLGLHKIELTCFGYNLQSKRVAEKLDFTLEARIRDRKDAQGNCCDDLRYALLKSEWEVI

SEQ ID NO: 716 - protein, 54 aa, Streptococcus pneumoniae
MGKIVAIDLFNGAGGTTSGLKKSGIDVQVAVEIDSVAVKTYKLNNPEVSVIDME

SEQ ID NO: 717 - protein, 40 aa, Streptococcus pneumoniae
LLRKQEGEYLRAENAILKKLRELRLKEEKEKEERQKLFKN

SEQ ID NO: 718 - protein, 37 aa, Streptococcus pneumoniae; identical to SEQ ID NO: 181

SEQ ID NO: 719 - protein, 76 aa, Streptococcus pneumoniae
LCCNRHIANLDLEFISYYLGQVGFDTRISTGLGIFVTKIGNVLFDTDNQFASFLNVCDTSISLDWFGSSKAEKANQ

SEQ ID NO: 720 - protein, 63 aa, Streptococcus pneumoniae
MKTKEQTRKLASGCSKHCFEVVDGTDVVSSKHCFEVVDRTDEVSNHTHGKATLTWFEEIFEEY

SEQ ID NO: 721 - protein, 41 aa, Streptococcus pneumoniae; identical to SEQ ID NO: 184

SEQ ID NO: 722 - protein, 207 aa, Streptococcus pneumoniae; identical to SEQ ID NO: 187

SEQ ID NO: 723 - protein, 81 aa, Streptococcus pneumoniae
MHIHYNTNQTTLPLEISSFLPQDHLVFTIEKVVNTLEERHFYAFYHAFGRPSYHPKMLVSTLLFAYSQGIFSGRKIEKWKS

SEQ ID NO: 724 - protein, 178 aa, Streptococcus pneumoniae
LRLWVIFVIMKVIKSYNTLNDYYRKLFGEKTFKVPIDAGFDCPNRDGTVAHGGCTFCTVSGSGDTIVAPDPPIREQFYKEIDFMHRKWPDVQKYLVYFQNFTNTHEKVEVIRERYEQAINEPGVVGINIGTRPDCLPDETIEYLAELSECMHVTFELGLQTTYEATSDLINRAHSYEL

SEQ ID NO: 725 - protein, 134 aa, Streptococcus pneumoniae
VETVKRLRKYPKIEIVSHLINGLPGETHEMMVENVRRCVTDNDIQGIKLHLLHLMTNTRMQRDYHEGRLQLMSQDEYVRVICDQLEIIPKHIVIHRITGDAPRDMLLGPMWSLKKWEVLNSIEMEMRRRGSVQG

SEQ ID NO: 726 - protein, 37 aa, Streptococcus pneumoniae
MKIKEQTRKLAAGCSKHCFEVVDKTDEVSHIHTVRRR

SEQ ID NO: 727 - protein, 37 aa, Streptococcus pneumoniae; identical to SEQ ID NO: 190

SEQ ID NO: 728 - protein, 1980 aa, Streptococcus pneumoniae
VFKKDRFSIRKIKGVVGSVFLGSLLMAPSVVDAATYHYVNKEIISQEAKDLIQTGKPDRNEVVYGLVYQKDQLPQTGTEASVLTAFGLLTVGSLLLIYKRKKIASVFLVGAMGLVVLPSAEAVDPVATLALASREGVVEMDGYRYVGYLSGDILKTLGLDTVLEETSAKPGEVTVVEVETPQSTTNQEQARTENQVVETEEAPKEEAPKTEESPKEEPKSEVKPTDDTLPKVEEGKEDSAEPAPVEEVGGEVESKSEEKVAVKPESQPSDKPAEESKVEQAGEPVAPREDEKAPVEPEKQPEAPEEEKAVEETPKQEDTQPEVVETKDEAANQPVEEPKVETPAVEKQTEPTEEPKVEQVGEPVEPREDEKAPVSPEKQPEAPEEEKTAEETPKQEDKIKGIGTKEPVDKSELNNQIDKASSVSPTDYSTASYNALGPVLETAKGVYASEPVKQPEVNSETKAEKVAANTDAKQSEVNSETASLKTAISGLNTDKVELENQLKIAQGKTETDFSMESWTVLSTAKNKAQEVKDNGTATQEQINEAEKSLKTALADLSVDKTALGSAIDTATKKNKENYTNQTWAELETVLTAAKSVNTNESKQSEVNEAVEKLTATIEKLVELSEKPRLTLSIEKRDIDRKVTVTYTLENPANTQIKSITATLKKGEEVVKDFVLTEENLKTNHLTALFEKLDYYKEYTLSTDMVYNRGNDDETESISEELIQLNLKKLELKDIQTVSLMKFENGQESQVTHLSDKPTDLSKLYLKVTSSTSKDAVLAVSSIEEEIVENKKIFKIHADTPELVVRKKDGSLSKGFDYYMERVIPHDGDIYYDFKDLISAMTSNPTGTFILGRDISSRNVKPDGNGKSYIKGEFKGKLLGTNDNVRHSIFDLEYPLFDTIKSGVVKDIDFKHVNMVFPDSNQGDNVATIARVIKDKTKIENVNVEGYLEGRDHVAGLVNNLEGNSEIENISFTGKIKSKGGNSITAGIAGRNILSRVKRAYVNANIEVLGSTNSSMLVAVNGTTLNASGGWGAWGRLTESVAKGTLEIKRSGQAGGVTATVWPYGAIDKVVSYAKVTKGKELFGSDGDLNNNWFMQKINNIFGVQGISSGDSGNDSKFKRISEEEAKQKVASYNITAPNLMSDSSLLVDRLNESWKNTDQFESIQDYQSQNQLIYQNLTKFTPYYNKEFIVHEGNALTPEQEILKTKKIKSIVGLKGTEFVVDGSDIDTIMLHFEDGSQKRYKVTSTGKFSITNLPEYQVEDLNVVYTSEHIVHPLDSSLINNLVEELKKVELYTESTYQVLGIDKDNANKLNRTKRLFLDESLDAVKTQLPTFVKTMFENEWLHINGESSGAVAALRQKIMDNKTAILLALTYINRYYDVKFSDYNIKKLMLFKPTFHGEKIDLLDRLIRLGSSGENRLKGSENAETFKQLFASETKQKDLVTYLDYNRSLLTNYQTTGEWFKETTKDYIQFEERPSLVEEIKDAKYRVYDNLTAPYYQGYILPLLTLKNTHLAILSNYSTMTFVSREKRPNWKNEDFDKWVKYVATAHRNHVDTWYKILPDNIKGKMVKENVTAVWEGLSIPGSEWVDQNAVDRKGRDYAPAREFFNLVGGPMGGWYAYHGYGAHAGGRNRVNYEVFDVLSEYGISVFTHELTHVNDTWIYLGGYGRRENMGPEAYAQGLFQSPVPGQPGWGALGLNMAFERKNDGDLIYNASPTQFENRKELDSYMKNYNDTLMMVDYLEGDAVISKGKEAITKWFKKVEPKVVSQTAQYDTVRQLTAEEKEKLSVSSVDDLVDQGLMSDRAVGNNTYNPADFETSYIAIDYMTGIYGGGKNSVGSPGALMFKHNTFRMWGYYGFEEGVLGYASNKFKQASRDEGHAGLSDNFIISKISKGEFLTMEAFKKGYFKKVVEELKTKGIRPVTINQKTYSTFEELQEGFKQAVERDLKKNQLDERETRNFKFQVFRQLLQQTDSFKTSIFR

SEQ ID NO: 729 - protein, 82 aa, Streptococcus pneumoniae
VGNRIFIAFLQKLGLLDNLTGIREKLHPITGQGNTLGIADKDFNAHFIFQISHCIGETGLSDKELLGCLIHRASFDDFDNIM

SEQ ID NO: 730 - protein, 99 aa, Streptococcus pneumoniae
MKTKKHRLLALALISSFTLLGAASAAVQYPDGGVWTYGEGSGGGWAFSNYYHGKKYHYSSLVSRWNSHSDKGEASAGKTSYAWIWTKWGEQVAFYCDYD

SEQ ID NO: 731 - protein, 279 aa, Streptococcus pneumoniae
MSMIEVSHLSKSFGDKIALNDISFTVKEGQIFGFLGPSGSGKTTTINILTGQLLADKGQSIILGQKSQNLTSGELKRIGLVSDTSGFYEKMSLYNNLLFYSKFYNISKLRVDNLLKRVGLYDSCKMVAGKLSTGMRQRMLLARALINKPAVLFLDEPTSGLDPTTSRTIHELILELKTAGTTIFLTTHDMNEATLLCDYVALLNKGKLVEQGAPSELIQRYNKDKKIKVTDYNGNQITFDFTSLEQVSQADLENIFSIHSCEPTLEDIFITLTGGKLNA

SEQ ID NO: 732 - protein, 182 aa, Streptococcus pneumoniae
LISNKVDITLANFTVTDERKKQVDFALPYMKVSLGVVSPKTGLITDVKQLEGKTLIVTKGTTAETYFEKNHPEIKLQKYDQYSDSYQALLDGRGDAFSTDNTEVLAWALENKGFEVGITSLGDPDTIAAAVQKGNQELLDFINKDIEKLGKENFFHKAYEKTLHPTYGDAAKADDLVVEGGH

SEQ ID NO: 733 - protein, 80 aa, Streptococcus pneumoniae
MKLFKPLLTVLALAFALIFITACSSGGNAGSSSGKTTAKARTIDEIKKSGELRIAVFGDKKPFGYVDNDGSYQGYATILN

SEQ ID NO: 734 - protein, 39 aa, Streptococcus pneumoniae
MTGKKGFLFLNCHICMVTTTTCFLKERVESELLIFFTFC

SEQ ID NO: 735 - protein, 93 aa, Streptococcus pneumoniae
MDTPDENGYVADDYRITYLEAHIKAMRDAIYQDGVDLLGYTTWSCIDPVSAGTGEMNKRYGFIYVDRDNVGNGTLKRSKKKSFYWYMSFIAMV

SEQ ID NO: 736 - protein, 45 aa, Streptococcus pneumoniae
LSCQIAFCLIDRLDYPIMFSKVCQENHFQVFTPFSKKLKNFLKNA

SEQ ID NO: 737 - protein, 41 aa, Streptococcus pneumoniae
MFLGMIGNISIILQFFGITIIVKIDNQARAIDFFKHDKSSF

SEQ ID NO: 738 - protein, 56 aa, Streptococcus pneumoniae
MFSLNFFDDNVFLSIKIAHKGCFQLLDMTNPNFFNKFFLAQASDQLLHFLSWNIEL

SEQ ID NO: 739 - protein, 325 aa, Streptococcus pneumoniae
MTEPDFWNDNIAAQKMSQELNELKNTYNTFHKMEELQDEVEILLDFLAEDESVHDELVAQLAELDKIMTSYEMTLLLSEPYDHNNAILEIHPGSGGTEAQDWGDMLLRMYTRYGNAKGFKVEVLDYQAGDEAGIKSVTLSFEGPNAYGLLKSEMGVHRLVRISPFDSAKRRHTSFTSVEVMPELDDTIEVEIREDDIKMDTFRSGGAGGQNVNKVSTGVRLTYIPTGIVVQSTVDRTQYGNRDRAMKMLQAKLYQMEQEKKAAEVDSLKGEKKEITWGSQIRSYVFTPYTMVKDHRTSFEVAQVDKVMDGDLDGFIDAYLKWRIS

SEQ ID NO: 740 - protein, 112 aa, Streptococcus pneumoniae; identical to SEQ ID NO: 197

SEQ ID NO: 741 - protein, 63 aa, Streptococcus pneumoniae
MKIKEQTRKLAAGCSKHCFEVVDETDEVSSKHCFEVVDETDEVSNHTYGKAKLMRFEEIFEEY

SEQ ID NO: 742 - protein, 290 aa, Streptococcus pneumoniae
MKVINQTLLEKVIIERSRSSHKGDYGRLLLLGGTYPYGGAIIMAALAAVKSGAGLVTVGTDRENIPALHSHLPEPMAFSLQDQQLLKEQLEKAEVVLLGPGLRDDASGENLVKQVFVNLSQNQILIVDGGALTILARTSLSFPSSQLILAPHQKEWEKLSGITIEKQKEDATASVLTSFPQGTILVEKGPATRIWEVGQSDYYQLQVGGPYQATGGMGDTLAGMIAGFVGQFRQASLYERVAVATHLHSAIAQELSQENYVVLPTEISRYLPKIMKIICQQERGSKDKLV

SEQ ID NO: 743 - protein, 131 aa, Streptococcus pneumoniae
VLDSKEELKESENDAPKLETPLREEPRLAPQTLPEASEVLENKREESKVEIIEPAQADDIRKVVGELAKDISITKLYMTGHSLGCYLAQIAAVEAYQKYPDFYNHVLRKVTTFSAPKVITSRTVWDAKNGF

SEQ ID NO: 744 - protein, 51 aa, Streptococcus pneumoniae
LSYSILICLCNSTINESLRAFYCWQKFITFNQVTGNARGKGTTCTSIGPDN

SEQ ID NO: 745 - protein, 55 aa, Streptococcus pneumoniae
MGRKPRTRPEERTELERLQAENEYLRAENAILKKLRELRLKEEKEKEERQKLFKN

SEQ ID NO: 746 - protein, 46 aa, Streptococcus pneumoniae; identical to SEQ ID NO: 179

SEQ ID NO: 747 - protein, 234 aa, Streptococcus pneumoniae
VVLSTSAILVACGKTDKEADAPTTFSYVYAVDPASLGYSIATRTSRTDVIGNVIDGLMENDKYGNVAPSQKDYDLNSTGWAPSYQDPASYLNIMDPKSGSAMKHLGITKGKDKDVVAKPGLDKYKKLLEDAVSEITDLEKRYEKYAKAQAWSTDSSLLMPTASSGGFPVVSNVVPFSKPYSQVGIKGEPYIFKGMKLQKDIVTTKEYNEVFKKWQKEKLESNSKYQKELEKYIK

SEQ ID NO: 748 - protein, 37 aa, Streptococcus pneumoniae; identical to SEQ ID NO: 206

SEQ ID NO: 749 - protein, 37 aa, Streptococcus pneumoniae; identical to SEQ ID NO: 674

SEQ ID NO: 750 - protein, 75 aa, Streptococcus pneumoniae; identical to SEQ ID NO: 208

SEQ ID NO: 751 - protein, 258 aa, Streptococcus pneumoniae
MNATDIKNTYLKYIKENAVFNDVTDTHTEVITPFIDPLGEAIGFSIKSNGKHLTVTDDGYTIWNLSINNIDVTKKGRRQDIFNSLLHFNGFDLHDGAIERTTGKEHLGQVIHDMTQLLMNVYDFIQLTPNNIKSQFLDDVKSYFMKNEHYTVFPAFSIAGKSRLEHRFNFVFMSKGISKIARVHNNITKQQVDTILASWLDTSEYRRKEYGDTEQLYIIVSDEGYNNIKDDHQIALQEYGINILNFSDKEQLEIQLGK

SEQ ID NO: 752 - protein, 154 aa, Streptococcus pneumoniae
MSKVVKVTGAEVVISHNEEYLKVNPSELNFVPKLGDEVEVHKVDGEIIVIKVKDKKDDKININIVNENNAMQNQSQVVHTQEIATGVHYVNKWVYVILALFLGGLGIHHFYAGYNGKGFLFLILSLTGIPAIIALFQGIIALFKKPDVYGRIAV

SEQ ID NO: 753 - protein, 67 aa, Streptococcus pneumoniae
MKIKEQTRKLAAGCSKHCFEVVDRTDEVSSKHGFEVVDETDEVSSKHGFEVVDETDEVSNRTTVRRR

SEQ ID NO: 754 - protein, 50 aa, Streptococcus pneumoniae
LQNDKNHKLFDNYTCQKEKDVLQCKQVKRKEERSYDVGTRIYTIYYFLLF

SEQ ID NO: 755 - protein, 42 aa, Streptococcus pneumoniae
VDRTDEVSSKHGFEVVDETDEVSNHTYGKVKLTWFEEIFEEY

SEQ ID NO: 756 - protein, 306 aa, Streptococcus pneumoniae
LFFKDEKQALYTKPKTKSSSFRASKVSNQTIVATTRTDCQVIALNLCDKLENGVVVVVQTTHHIGIDDVIYSKIFQHLTHSIKMSLAFFIKKVQDRRRILYCHLVFFFLRVQDTKRIFLQATLAILRQGLLERCQIVNQGLAVGCTALRISKSVEVQFDTLNTDFLQKMGCHSDCFHIGSWIARAKTLNTNLVELAQAPCLWTLITEHRSHIVELAWLLHFWGEEFIFHIGTDNGRSSFWTEGNMTVTLVIKIVHFLGYDIRCISDRATDNLVMLKNRRAHFCIVIALENLTGKALNVLPLSRFSR

SEQ ID NO: 757 - protein, 283 aa, Streptococcus pneumoniae
MEQIGKVFRQLRESRNISLRQATGGQFSPSMLSRFETGQSELSVEKFLFALENISASVEEILFLARGFQYDTDSELRKEITDVLEPKNIAPLEDLYRREYQKHAHSHNKQKHILNAIMIKSYMKSIDERVELTAEEGKVLHDYLFSTEIWGIYELNLFSVSSPFLSVSLFTRYVREMVRKSDFLMEMSGNRNLFHTILLNGFLASIECEEFTNAYYFKRVIEEHFYKENETYFRIVYLWAEGLLDSKQGRVKEGQKKMEDAVCIFEMLGCNKSAEYYRNTTEC

SEQ ID NO: 758 - protein, 38 aa, Streptococcus pneumoniae; identical to SEQ ID NO: 528

SEQ ID NO: 759 - protein, 54 aa, Streptococcus pneumoniae
MKIKGQTRKLAAGCSKHCFEVMDRTDEVSSKYCFEVVDRTDEVSNHTYGKATLT

SEQ ID NO: 760 - protein, 78 aa, Streptococcus pneumoniae; identical to SEQ ID NO: 530

SEQ ID NO: 761 - protein, 373 aa, Streptococcus pneumoniae
MKKVKLGEVLSLKKGKKATVLAEQTTLSQRYIQIDDLRNNNNLKFTESLNMTEALPDDILIAWDGANAGTVGYGLSGAVGSTITVLKKNERYKEKIISDYLGVFLESKSQYLRDHSTGATIPHLNKNILLDLQLELLGIEEQENIICILNTIKRLITKRKFQLDELNLLVKSRFNEMFEEYPDSVFLDTYIKELRAGKSLAGEENNKNKVLKTGAVSYDYFNSSEVKNLPIDYIPLDEHKVEIGDVIISRMNTSELVGAAGYVWAINSDNIYLPDRLWKVILNDRVNPVFLWKLITNEKTKLKIKRISSGTSGSMKNISKSQLLQIRVPFPPLALQNEFADFVALVDKSQLAIQKSLEELETLKKSLMQEYFG

SEQ ID NO: 762 - protein, 66 aa, Streptococcus pneumoniae; identical to SEQ ID NO: 210

SEQ ID NO: 763 - protein, 37 aa, Streptococcus pneumoniae
MRLSIQLIHDLNTHTTHSTAKMLYNVKAIKNDFSIRE

SEQ ID NO: 764 - protein, 42 aa, Streptococcus pneumoniae; identical to SEQ ID NO: 211

SEQ ID NO: 765 - protein, 72 aa, Streptococcus pneumoniae
LGTKIGISKNTIGNYEKRVKSTKKNTIFDLAKVFSSLIDALFPPVQKDSPSDIQSIYDQRAPPRQGKVLTYA

SEQ ID NO: 766 - protein, 131 aa, Streptococcus pneumoniae
LFVFILIFLKSSIYIGIFWFIDFGKAVDFQGWKVLFEFFMVVIDQFSFGCNPGVVFILPGIALGQQSIDTRICDTVDNAESEQKLTIGMTGVVIDKACKLDCLALKFIWIVVDSLHDFHIVFISDLNTILG

SEQ ID NO: 767 - protein, 178 aa, Streptococcus pneumoniae
LRLWVIFVIMKVMKSYNTLNDYYRKLFGEKTFKVPIDAGFDCPNRDGTVAHGGSTFCTVSGSGDAIVAPDAPIREQFYKEIDFMHRKWPDVQKYLVYFQNFTNTHEKVEVIRERYEQAINEPGVVGINIGTRPDCLPDETIEYLAELSECMHVTVELGLQTTYEATSDLINRVHSYEL

SEQ ID NO: 768 - protein, 168 aa, Streptococcus pneumoniae
MDNLCLHNTWTDWTSIFKQAVVTEDDMTKQNDFFLGIIDAEFHNCLGNFAINESDMSKKITSHCVLCLVWPRQLDDLSQVMQHNPRIEQALIELRINFANSVCQTHHGRRMIGQARFKGMVVGLGSWIGVEFLIILGVEISDNPLPDRIFNFENHLRHVVTNFLDINW

SEQ ID NO: 769 - protein, 167 aa, Streptococcus pneumoniae
MNVQYDFKKIQYFTSSLVIFLAILFLCAPINSLRADSITEPQTTLHKTITPISGQKDQYELSLDITSKLGTETQSEPLDVVLVADLSGSMEERDVWSYSSRRYISRIEALKHTLKGVNGRQGLIDTILSNSQNRLSIVGFAGKIDNQYNDRYYNEYYLSYQYGTWPN

SEQ ID NO: 770-776 - skipped (7 entries)

SEQ ID NO: 777 - protein, 39 aa, Streptococcus pneumoniae
MTVGFDLLHPDIQLNNCQDKGKHHGDIGQIGIVHVDVLV

SEQ ID NO: 778 - protein, 85 aa, Streptococcus pneumoniae
MEGVAKGRIGRKKNNGIDNRCCHKKRNGRVTWNLFFQKTIDDGDDSTFTRREKYTDKGPKKDSPPTISREKMINLVRCDINFNQP

SEQ ID NO: 779 - protein, 196 aa, Streptococcus pneumoniae
VVIGVASATTNIWIIFLSGFTAILAGAFSMAGGEYVSVSTPKDTEEAAVSREKLLLDQDRELAKKSLYAAYIQNGEFKTSAQLLTNKIFLKNPLKALVEEKYGIEYEEFTNPWHAAISSFVAFFLRSLPPMLSVTIFPSDYRIPATVLIVGVALLLTGYTSARLGKAPTKTAMIRNLAIGLLTMGVTFLLGQLFSI

SEQ ID NO: 780 - protein, 73 aa, Streptococcus pneumoniae
MILMTKNINLTNEELELIQGGADPYGKEPNGYYPWKMEPVLTLLVHGFCPRDTDDLGYIGGGNHLCKGSAARF

SEQ ID NO: 781 - protein, 52 aa, Streptococcus pneumoniae
LQVGQANEIGDPGAHFTQWNLLDDIGFDQLIQPNQKQYNDCHYCSFFHDFLF

SEQ ID NO: 782 - protein, 75 aa, Streptococcus pneumoniae
LLHICIGETFDCIPYCMLTFFLSKSIGLTILLHKVKTVVFIDDQSNDKTCKICIHISFFRIKLSQQCQLSFSVYF

SEQ ID NO: 783 - protein, 211 aa, Streptococcus pneumoniae
MTTIFLTRTSCSNCGKQSTFERFDRVYAAKTPEIISAILDWDFFKFTCHNCNHKVLIDYPTVVVDEEQKTIIQYCADGNVDVLSMQICSLISEGVNLSEYRIRVVSDIESFVEKVQIVSVGYDDRAIELMKYMNSPLEDGDIQFNYEHMVFTKVGHENYQFMFINNQIAVASLDFSQEQYEYYLADVEDLETNTYYIDSRWAESFFRTSLA

SEQ ID NO: 784 - protein, 370 aa, Streptococcus pneumoniae
MVRRNSKITRQQKKIRDAFVSERTVEIIPAKREFTDVKTKKLRVAAYCRVSTFDESQSGSFELQKQTYTERINSNPDWIMAGIYADQGASGTSIKRREQFQQMLHDCRCGKIDLIIVKSVSRFARNQLDFISIYRELKALSPPVGIYIEDINLNTLDTNSEFILGIMAIVAQGESEQKSASITWSVIERFKRGIPMIPTHNLLGYTKDQYGRVVIDETEAKIVRLIYDSYIEGMTASEIASTLMTNHIPTVTGLERWTSLAVYNILRNEKYKGEIIMQKTYTVDCFSHKTRKNNGEKPKYRLKNGIPSIIPESRWDLVQELLKQPRRKSKSTSEIFVPKLYIKKLKSGKLRDFVVLDPSWKSEDIHEVFK

SEQ ID NO: 785 - protein, 117 aa, Streptococcus pneumoniae
MTVNKNFVTFSKGIVQALEYPAHVLVAFNKDTKVMGIQVCRAKTRGAFSFSKPVGEQKGIVQVGHKTLKETLLTIMSEWKSDKRYRVEGIHIPEDKAFVFELKDFDELSDFRKNDNR

SEQ ID NO: 786 - protein, 405 aa, Streptococcus pneumoniae
MEKYNNWKLKFYTIWAGQAVSLITSAILQMAIIFYLTEKTGSAMVLSMASLLGFLPYAVFGPAIGVLVDRHDRKKIMIGADLIIAAAGSVLTIVAFYMELPVWMVMIVLFIRSIGTAFHTPALNAVTPLLVPEEQLTKCAGYSQSLQSISYIVSPAVAALLYSVWELNAIIAIDVLGAVIASITVAIVRIPKLGDRVQSLDPNFIREMQEGMAVLRQNKGLFALLLVGTLYMFVYMPINALFPLISMDYFNGTPVHISITEISFASGMLIGGLLLGLFGNYQKRILLITASIFMMGISLTISGLLPQSGFFIFVVCCAIMGLSVPFYSGVQTALFQEKIKPEYLGRVFSLTGSIMSLAMPIGLILSALFADRIGVNHWFLLSGTLIICIAIVCPMINEIRKLDLK

SEQ ID NO: 787 - protein, 487 aa, Streptococcus pneumoniae
MELILKAKDISVEFKGHDVLDINELEVYDYDRIGLVGANGAGKSTLFKVLLGELIPPGCKMNHLGELAYIPQLDEVTLQEEKDFALVGKLGVEQLNIQTMSGGEETRLKIAQALSAQVHGILADEPTSHLDREGIDFLIGQLKYFTGALLVISHDRYFLDEIVDKIWELKDGKITEYWGNYSDYLRQKEEERKRQAAEYEQFIAERARLERAAEEKRKQARKIEQKAKGSSKKKSTEGGGRLAHQKSIGSKEKKMHNAAKSLENRIAALGKVEAPEGIRRIRFRQSKALELHNPYPIVGAEINKVFGDKALFENASFQIPLGAKVALTGGNGTGKTTLIQMILNHEEGISISPKAKIGYFAQNGYKYNSNQNVMEFMQKDCDYNISEIRSVLASMGFKQNDIGKSLSVLSGGEIIKLLLAKMLMGRYNILIMDEPSNFLDIPSLEALEILMKEYTGTIVFITHDKRLLENVADVVYEIRDKKIKLKH

SEQ ID NO: 788 - protein, 99 aa, Streptococcus pneumoniae
MNQLEFQRNHLQMDYYSESYQDFERDFYRYSNMNIPLTFLTDDILKTMATSRKNYFVLNKEKSRDNRDHFFIFEVRTLEENPLIYHYTYKKTTTYLAEK

SEQ ID NO: 789 - protein, 103 aa, Streptococcus pneumoniae
MQKWMGFFLSEHTSALTDDANKVTYMSDLSLEKKLLLLSQVYAGQLNTRIHVVKKNNQVSYTGTIPSLTKDFILIKTTTGHINLKLKDIVSIELVEEVLYESA

SEQ ID NO: 790 - protein, 117 aa, Streptococcus pneumoniae
MKKSINAQKKIDPANLPKTMVGHVLELFRKKYTSGAVRQIGVSYGGFVDENFTLLSLFDDVEQIEKENRLQTAIDVVREQFGFLAIQKGTVLTEGSRNIERSKLIGGHSAGGLEGLK

SEQ ID NO: 791 - protein, 56 aa, Streptococcus pneumoniae
  misc_feature 3...4: Xaa is any amino acid
MNXXFISTKDKHTLIQVSAVRFRDGREIDAYDSYVHTSVPLKSFINEFDRGLQLRP

SEQ ID NO: 792 - protein, 46 aa, Streptococcus pneumoniae
MIAMRSYITLTCNLNNNLFCLNSFFLTNLVWSQIFSLLSVFITVYI

SEQ ID NO: 793 - protein, 79 aa, Streptococcus pneumoniae
MVFDANRIISEDSEGFVIPHGDHNHYIKVQTKGYEAALKNKIPSLQSNYQPGTFDEKAVLAKVDQLLADSRSIYKDRLS

SEQ ID NO: 794 - protein, 81 aa, Streptococcus pneumoniae; identical to SEQ ID NO: 230

SEQ ID NO: 795 - protein, 104 aa, Streptococcus pneumoniae
MASKRLSIEEQIEKKEESIKQLQNQKRQLKKKLNEQERKARNKRLIEKGAVFESIFEESIDLTKDEFYKLIKTLNDEEIRLNIMEILEERIDDNVEKSSKDEIT

SEQ ID NO: 796 - protein, 234 aa, Streptococcus pneumoniae
MADSFHFSVNIISRGKGKSAVASAAYISGEKIKNEWDGVTHDYTRKEKILVKNIILPDHIPKEFNDRSTLWNKVEMAEKNSNAQLARQFIIGLPKELSLSENKNLVERYIKENLTSQGMIVDYAIHDESQDKNGNIHCHIMTIMRPINEKGEFLAKSKKEYILDEKGEKVLNKNGKPKTRKVELTTWNDTGNVEKWRENFSDLCNKYLERAGAEKRVDHRVLKDKIQIIYRQSI

SEQ ID NO: 797 - protein, 305 aa, Streptococcus pneumoniae
MERKGIETDKGNYNREIRKYNQLVKTIKEEIKTLKGWIGNLLDNLSTAYEKFKDIERDKVIDNPKLFNLTNYLLTYSEIQKEKSKYLKGYAKTNKEKYDFKKLTSAYSYLRKNNIETIGQLQTKIETLKSNSYRLNKKAKTIHKEMEDVEKKILYYEIYKAKKEVYEEYQKKNIFTKEAFYNKHKKDIDQYKVVSGKLKKLLSDKEKLSPKKWNEEKILLMSNLEEINKEKDKIKDEYQEINHIKYSVDFVNKELGIDLSIEIDKLIKQGEKPSVIAQIKKFQDQVNKDNEYREMMKNKKMDQER

SEQ ID NO: 798 - protein, 410 aa, Streptococcus pneumoniae
MELSAIYHRPESEYAYLYKDKKLHIRIRTKKGDIESINLHYGDPFIFMEEFYQDTKEMVKITSGTLFDHWQVEVSVDFARIQYLFELRDTEGQNILYGDKGCVENSLENLHAIGNGFKLPYLHEIDACKVPDWVSNTVWYQIFPERFANGNALLNPEGTLDWDSSVTPKSDDFFGGDLQGIIDHMDYLQDLGITGLYLCPIFESTSNHKYNTTDYFEIDRHFGDKETFRELVDQAHHRGMKVMLDAVFNHIGSQSLQWKNVVKNGEQSAYKDWFHIQQFPVTTEKLVNKRDLPYHVFGFEDYMPKLNTANPEVKNYLLKVATYWIEEFNIDAWRLDVANEIDHQFWKDFRKAVLAKNPDLYILGEVWHTSQHWLNGDEFHAVMNYPLSDSIKDYFLRGIKKTDQFIDEIN

SEQ ID NO: 799 - protein, 156 aa, Streptococcus pneumoniae
MFNLLDSHDTERILWTANEDVQLVKSALAFFFLQKGTPCIYYGTELALTGGPDPDCRRCMPWERVSSDNDMLNFMKRLIKIRKYASVIISHGKYSLQEIKSDLVALEWKYEGRILKVIFNQSTEDYLLEKEAVALASNCQELENQLVISPDGFVIF

SEQ ID NO: 800 - protein, 119 aa, Streptococcus pneumoniae
MSEQYRDIRKEVNLTADELKQIEKMMEVDNYRHFSPFVRDKILMTDDKQLAAKEWFSLWQSQKFEQISRDVHLVLIIARENHQVTQEHVSILLTCVQELIAEVNQVQSLSRGFREKYMR

SEQ ID NO: 801 - protein, 121 aa, Streptococcus pneumoniae
MVYRYRTNLKKVFLTDSELHQLNERIAKSNCQNFSVYARKVLLNPNMSFVTINTDTYDQLVFELRRIGNNINQIARAINQSRLISQEQLQELSKGVGELIKEVDKEFQVEVKRLKEFHGSH

SEQ ID NO: 802 - protein, 616 aa, Streptococcus pneumoniae
MVVTKHFATHGKKYRRRLIKYILNPDKTDNLKLVSDFGMSNYLDFPSYEEMVEMYNVNFTNNDKLYEYRNDRQEKHQQNIHAHHLIQSFSPEDNLTPEEINRIGYETIMELTGGRFRFIVATHTDKDHIHNHILINAIDCNSDKKLIWNYALERNLRMISDRISKMAGAKIIEKRFSYRDYQKYRATSHKFELKQRLYFLMQQSKSFDDFLEKAEQLHVHIDFSQKHSRFMMTDRAMTKPIRGRQLSKRDLYDEDFFRMHFTKQEIASRLEFLLNCVNSLEGLLTKSKELNLTIDLKQKNVIFILEENGKQFSLSHKKISDEKLYDVNFFQDYFKNKEVGVSEGIENLQAQYRAFQEERDKEKVSTEEIEEAFETFKEKRDAVHEFEVKLTEHQIEKLVDEGIYIKVSFGINQSGLIFIPNYQLDIMEEENQKKYKVYIRETTSYFVYNKEHSDKNQYIKGRTLIRQLTNDSRVIPYRRPTVERLQEKISEISLLIELTETDKKYQDIKDNLVSEIAELDIKLTQTNEKIATLNKMAEVLINSKSEGSGSQKLARHEFSKLNMTESTTLEQVNEELLKLQQEFGNVLDEYEKTIRKLGQLFKVFDECINKEIMNEI

SEQ ID NO: 803 - protein, 225 aa, Streptococcus pneumoniae
MVCLIIDVSPYSTLCDIVVPKTHFLRQLMELCDFSFIYDELEKNYQPDFGCRSYSLLIMMFKYLLLKDIYKLSDVDVVERSFSGMTFKYFLGLAPVIEPSSLTKFRKLRNKDERLLDLLIAKSVQIAIELGLIKSNILIVDATHTKVHYNHKKPQEVLRERSKALRKTIYQYSEYIKAEFPSKPQEDTLVAELRYTQEVISVLEKHDELTGIPAISQNSITLKKL

SEQ ID NO: 804 - protein, 89 aa, Streptococcus pneumoniae
LESSVKEEARIGHKSADSSFYGYKEHFAMTDERIITACVVTSGEKSDGPVLEELYHKSKDNGVTIEAIVGDRAYSGKDNMQFTKKERVH

SEQ ID NO: 805 - protein, 56 aa, Streptococcus pneumoniae
MSVFKFRIFGFYLVAMFGLFFKIGRFLKPLLENMFIALKGYQISLRLSPFFITAHF

SEQ ID NO: 806 - protein, 317 aa, Streptococcus pneumoniae
MQEHYTPKGKHLTIDNRRLIERWKNENKSNREIAGLLGKAPQTIHNEVKRGTTLQQVRKGLYKKVYSADYAQTVYQFNRKRSVKKLILTKEIREKILHYHKQKFSPEMMVNKKQVKVGISTIYYWFHNGHLGLTKADMLYPRKRKGVKKQASPNFKPAGKSIEERPDVINLRLENGHYEIDTVLLTKIKNYCLLVLTDRRSRHQIIRLIPNKTAESVNQALTLLLGEHRILSITADNGSEFKRLSEVFPEEHIYYAHAYSSWERGSNENHNRLIRRWLPKGTKKTTPKEVAFIENWINNYPKKCLDYKSPSEFLLGG

SEQ ID NO: 807 - protein, 224 aa, Streptococcus pneumoniae
MLHPIFIIRRSWDGIFHLSEWKRNEEFDFFNKMDVPYLSMSSRIEVTQAINFHKKHSISLYAIISWCVMSAINSIPELLMDTDGKIVWQYNQRGCSFTTLTSEDKLNFSSFTMGDNLIEFVSAFNINKQKAEEGQKPNIDKNNIAYLSCVPWIDFLHVSTPMNLSKIDTVPRITWGKVIQENQRYFCTVNLQINHGMGDGLHVSNFFVLLQRFVNKINEYFQKK

SEQ ID NO: 808 - protein, 545 aa, Streptococcus pneumoniae
MSIFIGGAWPYANGSLHIGHAAALLPGDILARYYRQKGEEVLYVSGSDCNGTPISIRAKKENKSVKEIADFYHKEFKETFEKLGFTYDLYSRTDSPLHHEIVQELFLQLYEKKFLYTKKIKQLYCTFDNQFLPDRFVEGKCPNCGTHSRGDQCDNCSAILDPIDLVDKRCSICSNEPEVRETEHFYYVFSEFQNLLETYLNDAEETVRWRKNAINLTKRYLREGLPDRAVTRDLPNGIPVPIDGFRDKKIYVWFEAVAGYYTASVDWAQKLQNNITDFWNNRTKSYYVHGKDNIPFHTIIWPAILSGLEIEPLPEYIISSEYLTLENKKISTSNNWAIWLNDIIKKYDADSIRYFLTINAPEMKDANFSWREFIYSHNSELLGSYGNFINRTLKFIEKYFESEIPTKYLEGEILYNLKELYTTVGNLVESGHMKQALEEIFEYIRSANKFYDDMKPWALRESDIEKCKEVLATCVIIILNLGQMLNPFIPFSGKKIEDMFKTKLNTWNYISNLPNKLSDVSMLFDRIDLKKIDEEVLELQQTSSR

SEQ ID NO: 809 - protein, 255 aa, Streptococcus pneumoniae
LNNLTLLKEYNFRDLGNHLTQTGQKIKPKTLFRSSKLFGISKIDVDLLQSYGITKVIDFRSANEIKKAPDPDIKNIKNIVIPIFYNDDSELTEFPIEFFNKSDAGFQHMIKTYDQMINQKQSKLGYKKFFKLLLSHPKDESLLFHCSMGKDRTGIASLFLLYILGVDMNDIFHDYLLSNKYLINVRKENIEYVNNHSGNVILMHNLLSLSSAKEEYINRVLNVLDKEYGGILRYINTELGISSQEIEELKDRYLF

SEQ ID NO: 810 - protein, 194 aa, Streptococcus pneumoniae
MDFLNEVLDLKEFIQDPVRTLSLGQRMRADIAASLLHNPKVLFLDEPTIGLDVSVKDNIRRAITQINQEEETTILLTTHDLGDIEQLCDRIFMIDKGREIFDGTVNQLKKTFGKMKTLSFELHPGQDYIVSHFEGLSDIYVTRQELSLDIQYDSSQYQTADIIQQTLSDFTIRDLKMTDANIEDIIRRFYRKEL

SEQ ID NO: 811 - protein, 186 aa, Streptococcus pneumoniae
MTKLWKRYKPFVSAGIQELITYRVNFFLYRIGDVMGAFVAFYLWKAVFDSSHQSLIQGFTLSDMTLYIIMSFVTNLLTKSDSSFMIGWEVKDGSIIMRLLRPVHFAMSYLFTEIGSRWLVFVSVGLPFVILIAGLKLLSGESFLQIVLITTVYLLSLILAFLINFFSIFALVFQLLCLKTYGDQIF

SEQ ID NO: 812 - protein, 261 aa, Streptococcus pneumoniae
MKKYQRMHLIFIRQYLKQIMEYKADFLVGVVGVFLTQGLNMLFLNILFQHIPLLDGWSFHQVAFIYGFSLIPKGIDHLFFDNLWALGQHLIRKGEFDKYLTRPISPLFHILVETFQIDALGELLVGVLLLLMTITSLTWTWAKVFLFLISIPFATLIYTSLKIVTASIAFWTKQSGAIIYIFYMFNDFAKYPIAIYHSFLRWLISFIIPFAFTAYYPASYFLKDKDGLFNIGGLILISLIFFTLSLKLWNKGLDAYESAGS

SEQ ID NO: 813 - protein, 60 aa, Streptococcus pneumoniae
MIELAEPLPEYEILLSIPGIAETTATSIIGELETFVAFSLPTKSMPLSVLTSDTMNLAIS

SEQ ID NO: 814 - protein, 74 aa, Streptococcus pneumoniae
MLGWKDGHEVPILFPCRSREKVLYFWKGNLKHLVQAILSPNDVFCQILIESTEVTQILIDFFLNISWFAVKDEL

SEQ ID NO: 815 - protein, 46 aa, Streptococcus pneumoniae
MMRTVFRMDVSKASSEVAILVNGEKVHGYTMPNDAIGFSRLLEDLK

SEQ ID NO: 816 - protein, 597 aa, Streptococcus pneumoniae
MKKNNVEIIKADSLVRRRGDNVERHLKRVAAYCRVSSDSEDQKNSYDSQVRHYKEYISQRSDWELADIYADEGISGTQVGKRQDFQRLINDCANGEIDYIVTKAIARFARNTLDTLKYVRMLKDMQIGVYFEEENIDTLTMDGELLLTILSSVAQQEVENTSAHVKKGLKMKMQRGELVGFQGCLGYDYDVETKQISINKKEAKIVRYIFERYLEGIGGKVIARELDELGYKSPRGLEHWNDTTVLGIIKNEKYKGDILMGKTFTVDPISKRRLSNFGEEDKYYIKDNHEPIISKEDFEKAQEIRLRRAGNKKTAANVNGKRERYSKMYAFSSMLECGFCGSILSRRSWHCRSDYRKVVWHCVTSIKKGKKFCKHSKGLEEIAIEGAFLEAYRQVYHSNENLMTDLLETIESELNDNSLNKELKRITNKLRILLKKEENLVNLRLEGKVSDSIYNEKYNEISSEKEFLAEEKVNIETTLKSEIDVKKRLTEFKHLLSSQKMLTEFDRAVFESIVEKIIVGGVNSNGEIDPAMLTIIFKTGEIQNKDGKQFKSKRKNAKLETDKLCPQNSDEDKKLYSQGTDNTRGVCSVAGSILASQ

SEQ ID NO: 817 - protein, 195 aa, Streptococcus pneumoniae
MGGNPPMKKYSIVDKIVLSTKIKRIIIFTVFRENWEPYMKKYTEVFQSQFPNLNIDYLLLDTEQIDLDSYLDADIIIIGGGNTEKYIATYVNQEFKSYIDHMLNKEAKIIGFSAGALLLGEKVYVSPNDNSDHQIKIKNGLGLFSQFLISVHYDSWNDKANKDRAEELVNVPIIPLNDHSCLVLDKLGNIIEKID

SEQ ID NO: 818 - protein, 64 aa, Streptococcus pneumoniae
MDDEASKQLSDSRFKILVGVQRTTFEEMLAVLKTAYQRKRAKGGRKTKLSLDDLLMVTIQYMRE

SEQ ID NO: 819 - protein, 37 aa, Streptococcus pneumoniae; identical to SEQ ID NO: 207

SEQ ID NO: 820 - protein, 52 aa, Streptococcus pneumoniae
LILNEYEKRIFHEKTHNIECFDTCYYAFFIIFAPFLAFVIDKHCSSSLFLER

SEQ ID NO: 821 - protein, 123 aa, Streptococcus pneumoniae
MSQVKGLCVLDVDGTLILEEVIDLLGREAGHEAEISQITSRAMRGELVFESSLRKRVSLLEGLPILVFDNVFNSIHLSLNVPEFISILQKNGILVGLVPGGFTPIVGEISKIPWYCLFHCQPA

SEQ ID NO: 822 - protein, 41 aa, Streptococcus pneumoniae; identical to SEQ ID NO: 266

SEQ ID NO: 823 - protein, 37 aa, Streptococcus pneumoniae; identical to SEQ ID NO: 674

SEQ ID NO: 824 - protein, 564 aa, Streptococcus pneumoniae
MDKLIIFIEKGKPFFEKLSRNIYLRAIKDGFISSMPAVLFSSIFILIAAVPNIFGFKWSDEQLAFILKPYNYSMGILALLVAGTTAKSLTDSVNTRSMEKTNQINYMSTFLAAVVGLLILAADPIEGGFANGLLGTRGLLTAFLAAFITVNIYKVCIKNNVTIRLPEEVPPNIAQVFKDVIPFALSVLSIYGLDLIVRNIFGTNVAESVGKILAPLFSATDGYIGLAIVFGAYAFFWFVGIHGPSVVEPLIVAISYANIEANVQLVQAGMHADKILNPVTQTFVVTMGGTGATLVVPFMFMWLCKSKRNRIVGRASVVPTFFGVNEPILFGAPIVLNPIFFIPFVTAPIINVWIMKFFVDVLQMNSFSIILPWTTPAPIGIVMGTALAPLSFVLAITLIIIDTLIYYPFVKVYDHQILEEERKGNSSSELKEKVAANFNTVKADAILEKAGVDAAQNTITEETNVLVLCAGGGTSGLLANALNKAAAEYNVPVKAAAGGYGAHREMLPEFDLVILAPQVASNFEDMKAETDKLGIKLAKTEGAQYIKLTRDGKGALAFVQEQFD

SEQ ID NO: 825 - protein, 39 aa, Streptococcus pneumoniae
LFKTRSNSSALGSSYISNRNIFSYFTNQFNNTFCNVFGM

SEQ ID NO: 826 - protein, 39 aa, Streptococcus pneumoniae
MALTQRQFVELFQETINVITLTCLTVSVAVVACVSICSS

SEQ ID NO: 827 - protein, 50 aa, Streptococcus pneumoniae
MLTMFLFLPIDFFFCTDIIRMSCILKVNIVFSIYLNHITTLDFTDNILVL

SEQ ID NO: 828 - protein, 48 aa, Streptococcus pneumoniae
LVCYFDDDLFGIDSFTLANLIRSQILRFLRRLFSIYIGNTIISLTVLA

SEQ ID NO: 829 - protein, 37 aa, Streptococcus pneumoniae; identical to SEQ ID NO: 674

SEQ ID NO: 830 - protein, 1908 aa, Streptococcus pneumoniae
MEKYFGEKQERFSFRKLSVGLVSATISSLFFMSVLASSSVDAQETAGVHYKYVADSELSSEEKKQLVYDIPTYVENDDETYYLVYKLNSQNQLAELPNTGSKNERQALVAGASLAALGILIFAVSKKKVKNKTVLHLVLVAGIGNGVLVSVHALENHLLLNYNTDYELTSGEKLPLPKEISGYTYIGYIKEGKTTSDFEVSNQEKSAATPTKQQKVDYNVTPNFVDHPSTVQAIQEQTPVSSTKPTEVQVVEKPFSTKLINPRKEEKQSSDSQEQLAEHKNLETKKEEKISPKEKTGVNTLNPQDEVLSGQLNKPELLYREETIETKIDFQEETQENPDLAEGTVRVKQEGKLGKKVEIVRIFSVNKEEVSREIVSTSTTAPSPRIVEKGTKKTQVIKEQPETGVEHKDVQSGAIVEPAIQPELPEAVVSDKGVPEVQPALSEAVVTDKGEPAVQPELSEAVVTDKGEPAVQPELSEAVVTDKGEPAVQPELPEAVVSDKGEPAVQPELPEAVVTDKGETEVQPESPDTVVSDKGEPKQVAPLPEYTGPQASAIVEPEQVAPLPEYTGVQAGSIVEPEKVEAPKEYTGKIEQPSAEDTKPENEASSTNGESERPKDKIKEEKQVDKKLELRNVSNVELYTVENNKYRHITAVDGALDSSLKYFMKVKSENFKDIMLPVTKIESTTKNNKEVYKIVAHAENLIQHENNVISNDYTYYLPKTQQSETGVYTSFKNLVDAMNSDPNGTFHLGATMDAREVELPDDQESYVKNEFYGKLIGENNGKYYAIYNLKKPLFKTLNTATIQNLSIKEANVSSKEDAATISKEAKYNTLIDNVHSDGIIAGERGIGGLVSKVDNSRISNSSFTGRITNTYDTTAGYEIGGLVGKLSGSLASIEKSIASIDIASNAKSGDQIVGGIAGVVEKSATIKYSYVEGNVNNVRHFGKVGGVAGNLWDRDSQDVSKSGKLSYVLSDVNVTNGNAIAGYNFNGIKTIETYSNKNNKVVNVVQEDDEVVTKDSDVQRGTVLDADKVKEKKVELVSKHSTKVEDFDFTSRYNTNYNEVTGYQQSREQVYKNIEKLLPFYNRETIVKYGNLVEDNSDLFTKKLLSVVPMKNNEVITDINKNKQEINKLLLHFEGNKSRVLNIAYKNDFSKVAEYDIANTKLMYTPNTMLHDYNNIVKTILNDLKSVQYSSADVRKVLDISGNIKLTELYLGEQFEKTKANIEDSLSKLLTADAAIVENNNKVIDNYVIEKIKNNKEALLLGLTYLERWYNFNYGETNAKDLIMYHLDFFGKSNSSALDNVIELGKSGFNNLLAKNNVITYNVLLAKNYGTESLFKALEGYRKVFLPTISNNEWFKKQTKAYIVEEKSTIEEGREKQGKEGTKYSIGVYDRLTNPSWKYQSMVLPLLTLPEEKTVFMIANISTIGFGAYDRYRSSEYPKGEKLNKFVEDNAKEAAKRFRDHYDYWYKILDNDNKEKLYRSILVYDAFKFGTDKDKDKVTHQATFETDHPAIKYFFGPAGNNVVHNGHGAYATGDAFYYMAYRMLDKDGAVTYTHEMTHNSDREIYLGGYGRRSGLGPEFYAKGLLQAPDHPYDPTITINSVLKYEDSENSTRLQVADPTQRFNSAEDLHNYMHNMFDVIYMLEYLEGKAVANLETNQKYELLRKIENKFDLDQDGNNVYATNVVRRLTMDEVNKLNSFDSLIENDIITSRGYKDQEYKRNGYYTIDLFSPIYSALSGEKGTPGDLMGRRIAFELLAAKGYKEGMVPYISNQYEKDAKAAGSKINSYGKEVGLVTDELVLEKVFNGQYKTWTQFKKDMYKEREKQFSKLNRVNFINPNNPLSRQRNVSVTDIGVLERMIVEAVRDDAQDDVAKFYPETNSRVLKLKKAIYKAYLDQTNDFRSSIFENKK

SEQ ID NO: 831 - protein, 1801 aa, Streptococcus pneumoniae
LSLLKKDKFSIRKIKGIVGSVFLGSLLFAPSVVGASTYHYLDYSSLTQTERDQLKQGRPDESKESYALDYEKDALPNTGSSQSIMTALGLLAIGSLIVIITKDNRNKKIATFLIVGATGLVTLSTASALNLNANIHESGRDGVLQISGYRYVGYLELDDKTVSSVSPASTVSPVEQPKVVTEKGEPEVQPALPEAVVTDKGEPEVQPTLPEAVVTDKGEPEVHEKPDYTQPIGANLVEPEVHEKLAYTESVGTTGMDENGNLIEPPVSDIPEYTESVGTTGVDENGNLIEPPVSDIPEYTESVGTTGVDENGNLIEPPVNDIPEYTEPISTVSEVASEREELPSLHTDIRTETIPKTTIEESDPSKFIGDDSVKEVGEDGERQIVTSYEELHGKKISEPVETVTILKEMKPKILVKGTKENPKEKTVPVLTLTKVTEDAMNRSANLNYELDNKDNAEISSIIAEIKDGDTVVKKVDLSKEKLTDAVQNLDLFKDYKIATTMIYDRGQGSETSKLDEKTLRLELKKVEIKNISSTNLVKVNDDGTEIPSDFMSEKPSDEDVKKMYLKITSRDNKVTRLAVDKIELVTEKEKELYKITASAQDLIQHVDPSKTRNEYIHYIEKPVPKVNNVYYNFNELVRDMQEHPNDEFKLGADLNATNVSAFGKSYVTKDFKGKLLSDGDNHYTIHNLSRPLFGNVIGGTIKNINLGNVDINMPWANQVAAVANIIKGGTTIENVKVKGNIVGKDWVSGFIDKIDNQGTLRNVAFIGNVTSVGDGGQFLTGIVGENWKGLVERAYVNANLIGKKAKAAGIAYWTQNEGNNNTVRQEGAIKKSIAKGTIQVTEAIESGGVVGSMKHHGSVEDSVSMMKVPNGEIFYGSSDIDYDDGYWTGDNVRRNYVVIGVSDGHSSYQRSKDKNRIRPISEEEAKSKIEATGITADKYEINEPVVNRLNRLTRREDEYKSTQDYKVDRDLAYRNIEKLQPFYNKEWIVNQGNKLAEDSNLAKKEVLSVTGMKDGQFVTDLSDIDHVMIHYADKTKEIKAVHQKESKVAQVREYSIDGLDDIVYTPNMVDKNRDQLIKDIKDRLATVELISPEVRALMDKRDTSRDPNANSDERKNGYIRDLYFEESFSETKANLDKLVKSLIENADHQLNSDEAAMKALVKKVDENKAKIVMALTYLNRYYDIKYGDMTIKNLMMFKPDFYGKSVDLLDFLIRIGSSERNIKGDRTLDAYRDMIGGTIGKSELHGFLDYNMRLFTNDTDLNDWFIHAAKNVYIVEPKTTNPDFVNKRHRAFDGLNNGVHNRMILPLLTLKNAHMFLISTYNTMAYSSFEKYGKYTEAEREAFKDKIKEVAHAQQTYLDFWSRLALPSVRDQLLKSQNRVPTPVWDNQNYHNVEGVNRMGYDKNNKPIAPIRELYGPTWRYHTTNWYMGAMASIFQDPNNNDQVYFMGTNMISPFGISAFTHETTHVNDRMLYFGGHRHRQGTDVEAYAQGMLQTPDKSGNGEYGALGLNMAYHRENDGDQWYNYDPDKLKTREDIDRYMRNYNDALMMLDHLEADAVIPKLHGNISRWFKKMDRQYRKNGELHQFDKVRELTEDEKKKIVINNIDDLVNNNLMTKHGAPSDRTYNPEDFDSAYVNINMMTGIYGGNTSQGAPGAASFKHNTFRMWGYFGYENGFISYASSKYQGEADKTNKKLLGDDFIIKKVSKDKFNNLEEWKKQYFKDVKSKAEKGFTAIEIDGRQITNYAQLKTLFAEAVQKDIDGMSDPKIKDHFKNTVDLKSKVFKALLKNTDGFFNKLFKEDI

SEQ ID NO: 832 - protein, 145 aa, Streptococcus pneumoniae
VLGGRANSVTSCTTNSHWNLTFTTKHVTCFSSLVDDIVHGNNREVHEGHIDDWTKSCHGCSCCCSRDGSFRNRTVTDTFWTKFFKHSNRSTEVSSEDTDVFSHQEHIFIATHFLRHSKDNGVTEGHCFCFHFISFSLVCVNIFKG

SEQ ID NO: 833 - protein, 129 aa, Streptococcus pneumoniae; identical to SEQ ID NO: 270

SEQ ID NO: 834 - protein, 77 aa, Streptococcus pneumoniae
  misc_feature 3...4: Xaa is any amino acid
MNXXDFIGHCDKIKRNIFEKSHKVFSGLFGLHPKDFLNLIFSNQIPLPFSECNPLTNYNHLFSLIISDKRDIVIHWI

SEQ ID NO: 835 - protein, 78 aa, Streptococcus pneumoniae
LIEIQVFSSLQVCCLNLCHLKFQHFDTCLVFLLVFLDFQNLLAHFPIGIKTRLIGFFQVPKSGITKFIQHLDMQLGTH

SEQ ID NO: 836 - protein, 46 aa, Streptococcus pneumoniae; identical to SEQ ID NO: 276

SEQ ID NO: 837 - protein, 55 aa, Streptococcus pneumoniae; identical to SEQ ID NO: 277

SEQ ID NO: 838 - protein, 50 aa, Streptococcus pneumoniae
LFVIRNPSSQTLFQTQLQLVQALQITVIQALRLSKDNRLTAFFQSLLFLR

SEQ ID NO: 839 - protein, 168 aa, Streptococcus pneumoniae
MPHTRDNWQTRFKNSSYHNFFVKGPEILNRTTSTTNNEQIQIVPLISTRNISSNFLRSPFTLNLGRIKKDVNTWESPADGRDNISNNGSTTAGYYPNSLRKLGQSLLEAFLKQAFFCQFFLKLFKLNRKRPNPIRLNFFNDDGVATTWFIDLYTPNHIDLHSFFQVKP

SEQ ID NO: 840 - protein, 50 aa, Streptococcus pneumoniae
VTLADFVADRRAATPTAAAELATPVTKVGCISSFAKSGKTDGNGSPKCSI

SEQ ID NO: 841 - protein, 154 aa, Streptococcus pneumoniae
LAIIRNRTCSLKLINDHLTFWTLRFLTSTRILIELATINLNCRIHRGNLSNRPSQASNRFINKLFIQGRQNRGFCDHFPTSILSRRGIAQSDFPLIDLTLVLHKLDHACRLANRNRQNTHHIRIQGSTMTNFLGSQNLTQFKNRIMRGHSCFLF

SEQ ID NO: 842 - protein, 1061 aa, Streptococcus pneumoniae
MEDDLNYENLMDDVTEAIKKFNLVIFIGAGVSIAQGYPNWNNYIEHLIKYWQGQVLSVSGEKRLGREHHVVFDLISKSSISNKRKVDLVNYELKKVFGEDFEKRRLDFEKGYFKNLLPYSIVNQTVESLASLNAIFITSNYDYEIENHIKRLKNAVVTINDLNEFTKNKNGKLQFGDVLHIHGTPDCDVKYFVSSSADYSKTYLKNRENFENLVTWFKETKPTVLFIGAGLEEDEILSLLCKDSKNYALMKSENTGNQRVDEHYRGVVEGFFSSENHTQIIWYGDEFEKLPLFVKKLVADINEKLGTHDFYNQWNNLLNPSINQEEYNKNLDSISNDFKYLSSVLDKVIENDNNQLDQLMLNALLRSETLTVIKKNFVLVFWKFIVKNIEKLSDNEWDVIYKIIYEGSQNYFIDDVFFVYNYAIDNKISSFTNNNKLNELREIISKDGYIVNSNFNKDKTLLGYWLVSAFEQQNRDLYIKEDSEVEVNLNYECVNKLMSILNNPEFLSYNYYSIEHQLKEYDVVKFLYELVKSKKLFIEEEKFLESDSEDLISTILIQKLLVQLDNEINLDLEFIKRLIDKIDFSNIHFGEELNTFIKEHRSIIREKNIEIPKKPYRNWISSLEGGFVSQFSYLTQENLVEYDESRVLEILVNAEKEQRGSSFLEEKTINETENFFITVLKESNEISKKVSDLLKNHIDDLYPKYKRLYVKIISFPEIEENLRKIVREKYLKRFNKESFDSNDRKFFEYHIKQQNTDIDIFEKLLSINVNELSTPKGDNKQLDILHFINSEMGSYFQCLISLFINHSSYRDVIIQIINSVTDTDYREFAQGILLNEYNPNRINVTYNTFLGFAYYHSTITIEAADVFTDVVRDILNKKIEDNQILNKVYLVALERVDPTIESFSLSKNNYSQMINIIFTGDYEFRYSKEWLGALFKFDSSANYLVTIFYLLYNENLKKNRFALFIEELSDYLTTYNQKLSLRGMNYKLNHEELNNFDLLKKMFLKLMETDKIENDIFYLDGIKSILPLLSLDDRRNVLQHIQKQNNCPPPEIEELQRIIVN

SEQ ID NO: 843 - protein, 91 aa, Streptococcus pneumoniae
MFMSNLCQFFQVWNINQGVTQGFNQDKLGIVFDSCFYFLQIINIDKGCCDTITRKEFFQKIEGSTVNSRSSHYMVTSMGKRQNRISHCSHT

SEQ ID NO: 844 - protein, 211 aa, Streptococcus pneumoniae
LINVFSHGVDIAIHSATKFIGGHGTTIGGIIVDSGRFDWMASGKFPQFVDEGSSCHNLSYTRDVGAVAFIIAVRVQLLRDTGAALSPFNAFLLLQRLETLSLRVERHVQNAETIVDFLVNHPKVEKVNYPKLADSPYYALAEKYLPKSVGSIFTFHVKGGEEEARKVIDNLEIFSDLANAADAKSLVVHPATTTHGQLSEKDLEAAGVTPN

SEQ ID NO: 845 - protein, 40 aa, Streptococcus pneumoniae
MTCDFKFETLQLHAGQVVAPATKSRAVPIYQTTFFVFDDT

SEQ ID NO: 846 - protein, 101 aa, Streptococcus pneumoniae
MAWLLVGNVGVRQVLEHLNAELKKVMQLSGTQNIENVKPFNSVTSIKPTLPNDPPDLKFIDKKNAPPKCGVFLCYGKKFVLKNKKNEIRIGRIVQDSQIDF

SEQ ID NO: 847 - protein, 194 aa, Streptococcus pneumoniae
LKKKWFFADYYDTTIILLALISVILVLLGFAEMIDLDNPPYSIIDLVIWGVFVIDYSWRFFITKRKWRFILENVFDLLAILPLNAIFTVFRLGRIFRLARLTKLLKLTRLLRIIGLTGKLERKISRFLRTNGLIYILYVNIFIVLVGSSILSVVEEKSFSDSLWWALVTVTTVGYGDIVPVSLFGKTNYRAKEY

SEQ ID NO: 848 - protein, 80 aa, Streptococcus pneumoniae; identical to SEQ ID NO: 285

SEQ ID NO: 849 - protein, 180 aa, Streptococcus pneumoniae
MAERTVVQVHNAFPEDTTLINSQLIPLVQVVVNQGRKGIVGSCNSMHISSKVEVDVFHWQNLCIPTTSSTTLDPHDWTKRRFADSNHGFLANLVQGIRKTNGKRRLSFTCRCWVDGSNQDQFTDWIALNCTNFIKAEFSLVLSVQLQIVVRNTKFLYNINNWLQLNTLCDFNICFHSKFL

SEQ ID NO: 850 - protein, 188 aa, Streptococcus pneumoniae; identical to SEQ ID NO: 287

SEQ ID NO: 851 - protein, 116 aa, Streptococcus pneumoniae; identical to SEQ ID NO: 288

SEQ ID NO: 852 - protein, 75 aa, Streptococcus pneumoniae
MIHFSQHLTCQSLNFTNTVNFVSKKFYSKGMFISGSWENLYHIPTNAKSSALEINIITFKLNIDQVIQEFITRNL

SEQ ID NO: 853 - protein, 110 aa, Streptococcus pneumoniae
VAKLVNLVIDRTILLNIGIARRDIGLWLVIIIVGYEILNCIFREKFLKLPIELTSQSFIVGNNQSWFIDFRNDLTHSIGLPCSSRPHQNLSFFSPLNVIHQLLDSLGLIS

SEQ ID NO: 854 - protein, 122 aa, Streptococcus pneumoniae
MNITQTDFLAVNLVFAISTTIDMAFHPDFLTCILDKSVMIIQSHNYRSIIERFATFCSSKDDIRHLAPTETLDTRLPQSPTQTFCNIGLSRSIGSNNCRHTLVKNDLGLISKRLEPLNFDFL

SEQ ID NO: 855 - protein, 77 aa, Streptococcus pneumoniae
MSFIVCNHLKFACFNLRNHDLIDKFLDLGHILIQKKGTKKGFKGITKNGVTIATTRFFFPFTQLDKLVKLAITRKTS

SEQ ID NO: 856 - protein, 65 aa, Streptococcus pneumoniae; identical to SEQ ID NO: 293

SEQ ID NO: 857 - protein, 345 aa, Streptococcus pneumoniae
MTKKIVALAGDGIGPEIMEAGLEVLEALAKKTGFVYEIDRRPFGGAGIDAAGHPLPDETLKACREADAILLAAIGSPQYDGAVVRPEQGLLALRKELNLYANIRPVKIFESLKHLSPLKSERIAGVDFVIVRELTGGIYFGDHILEERKARDINDYSYEEVERIIRKAFEIARNRRKIVTSIDKQNVLATSKLWRKVAEEVAQDFPDVTLEHQLVDSAAMLMITNPAKFDVIVTENLFGDILSDESSVLSGTLGVMPSASHSENGPSLYEPIHGSVPDIAGQGIANPISMILSVSMMLRDSFGGYEDAERIKRAVETSLAAGILTRDIGGQASTKEMTEAIIARL

SEQ ID NO: 858 - protein, 105 aa, Streptococcus pneumoniae
VVRNTASHLTCILFLNKGISVYIGNSRSLKHIKIKPCCIKDGFCISVFNSDQNPILGIDSICYRIDSVGHQTNRLVKELIDSIKDCFNGTLPCRIKFDFLTIHIG

SEQ ID NO: 859 - protein, 45 aa, Streptococcus pneumoniae
VEAFWIFNHGSSYQSSNICICDFLLLIGQCLELSKEWFDILFCKI

SEQ ID NO: 860 - protein, 75 aa, Streptococcus pneumoniae
LANIESHCNFFQSSISSSLPNTIDSPFNTSCTILDSSKAICHCHSEVIMTVRRIDDLTIRLDILNQVFEDGTIFL

SEQ ID NO: 861 - protein, 317 aa, Streptococcus pneumoniae; identical to SEQ ID NO: 806

SEQ ID NO: 862 - protein, 85 aa, Streptococcus pneumoniae; identical to SEQ ID NO: 299

SEQ ID NO: 863 - protein, 57 aa, Streptococcus pneumoniae
VNHCHWKLFIQNLGITFSLIVTLIRMTDSHVVGTDKDMIFLVNSLFLIFDIDKLRLS

SEQ ID NO: 864 - protein, 84 aa, Streptococcus pneumoniae; identical to SEQ ID NO: 301

SEQ ID NO: 865 - protein, 86 aa, Streptococcus pneumoniae; identical to SEQ ID NO: 302

SEQ ID NO: 866 - protein, 39 aa, Streptococcus pneumoniae; identical to SEQ ID NO: 303

SEQ ID NO: 867 - protein, 59 aa, Streptococcus pneumoniae
MAFVLHTEKHHDINLINDFINGYKLSIVCKLLTSPFLRSSEKEFRSQAFQNLHIGFGNA

SEQ ID NO: 868 - protein, 69 aa, Streptococcus pneumoniae; identical to SEQ ID NO: 305

SEQ ID NO: 869 - protein, 56 aa, Streptococcus pneumoniae
MCPCRILKEEIGNNRMVFIGKLGSIFKLNSSLDQFHYLIDSEVFHGHHMVQCLLIF

SEQ ID NO: 870 - protein, 43 aa, Streptococcus pneumoniae
MSINCKGWNPKSYTHDNIGCLATNTCQTLQFFTCLRDLTIKIV

SEQ ID NO: 871 - protein, 46 aa, Streptococcus pneumoniae
MPDCTLTNFLDKVLYNRQGNVGLEQGQANFFGCLLDIRFRDFSFFT

SEQ ID NO: 872 - protein, 78 aa, Streptococcus pneumoniae
VQFHLIIFQNLFCSLDIVIDSLTTDTELLGNFSKAVIISVVELDIIHLLICQKRRIKFKERIHTIGFFDFHNFYYTKN

SEQ ID NO: 873 - protein, 74 aa, Streptococcus pneumoniae
MKFNHYFFLFLIIEKQVAIISFFMHFHIIKLVNHFQLLIKLNCISHPNLHIRPSFLSLVLLFYQKEQDFAIMVI

SEQ ID NO: 874 - protein, 591 aa, Streptococcus pneumoniae
LANNRKTETLGVSYLSTFIDKHELLQSYFESNDKTPVWDGEIHVLKSPSEKKDEILGKVPVQIKTTRQKKDVLKSFSLDTRDLELYKPNGGVVLFVVWLNEDNGLRDIYYKSLPPLSIKNLLKKSKLKNKSTNRKKLSIEIFKLDEKKMYPMLVDFINNSQKQYSFINVEGISVEDIPDDKTLKFYFYGQEKEEIFNYQEEHDLFIYYLDPITGIEIPLENTIKIVETEEETDLIIKIGDYVFQDVKRHRFPDGSVQLHFGESFTMSFDIKKKQFKFNYTRPDLLSKAIKCTQVFQELGKIGYFTLNGNKIELDERSIKDISSLDLEADIKGLLKISNFMKKMGIQKDVDLSCFDKQSQRNLNILYSGLVLKKKVALNYNESKLLHLNIANIHIITLYSFLSDKNGTMIDIFTETPWCREGETEDEDYLDISIFEVFEPNDWLKIDNCKIDSVIASYQRLVDNKLKYEGADRTILKIVIAADMAEDKTKRELLLNWAQCLSDWNLKYSKNCEMAIINDLQIKSRVRKLNSKETETLTNILVNSNDNYELCFGSSVLLKSKPQADLFWNKLDNETKERYKDFPIYTLYMKLS

SEQ ID NO: 875 - protein, 393 aa, Streptococcus pneumoniae
MKVSKKITLFSLSFAGFVLLTLPQAGKAFELKEDWAFKGGIRYENGKVSKINNGYEVNIKVLDLPSTSAIEWTVRLNGEKQNTNFLAEERTVSKTEDKGRFLHFYIPYGYRGDIVVEAKSGNEVKTWSTKVVDDVYSDSAKSGYFILDGEQILESSWDSVNESYIATLPTVTSGKTVVAWREKGTLNLIKPGRIARQYNSSGSYVELSPIFETASWLKSNQNWYYQKQGQLVQNSWIKDQGSWYFMDDEGVMFNQTWLHQGGSWYAFKSSGAMISADWLYDNGSWYYLKDSGSMVTGWLKNGGSWYYLNKSGSMATGWIKDSGTWYYLKNSGSMATGWVKDSGSWYYLKNSGSMATGWVKDNGKWYYLASSGNMLRNTRTPDGYYVDGSGAWK

SEQ ID NO: 876 - protein, 406 aa, Streptococcus pneumoniae
MKKILLSTVALLSLVASLLANNPVSAQESSSQATYSKSSGSWIKSGNRWWYKHSDGSYTTNGWEKINGTWYYFDSEGWMKTGWIKEYGKWYYLDDSGAMKTGWCLVSGSWYYLNSSGVMQTGLQTINGKQYYLAAGGAMQTGWHNIGDDTYFFANSGENQNINRRALVLGETSTRAVPIADVNAMEKVFNNQNFSEVVRFPDRTKSEIIAKMQELFESSSEGDVNYLYFTCHGGRDGRIYIGSDGLAFSGWELASVLKQYKGKFVVMLDCCHAGTIISKDNTGEGNEGASTEYFDLDEFVSGFSNMDGNEKSGEMIDSKFLVLCSSRGAEYSSGGSLSLATKYWSLGSGWNPLQNSQAYLAADQNNNRRITLNELYTYSREQVLKQNSNQHIEVYPDNSQFVLFKK

SEQ ID NO: 877 - protein, 284 aa, Streptococcus pneumoniae
MENFGAVLKDIRISKNFRLKDLSCNEISESTISRFENGITKLSINHFYILLNRLGISFSEFEELVHCYYSKKECLFEELEHAVNSSDIFLLQELVDKIELKQKQEKSLCNYHIKLIAEQQINRLANLPYNSSKCNELIKYLLSVDTWMEYELKLFYNSVFFMNTRTISLLYRIVIKKTRYFLKTNTGTHRIIPLYLFNLKLLLKNNLLGSAQFFIDDLENLLTRQGYYFEKNYLLFLKGIYLIKTNQIELGKKECFKAMRIFKEYNDSDTINELNQKFKLDLTI

SEQ ID NO: 878 - protein, 55 aa, Streptococcus pneumoniae
MSSIYSSAKKDFLYWNVLIFIMELPNDVKVQFYELRKKVQSFNQLSKRFGMDVSG

SEQ ID NO: 879 - protein, 176 aa, Streptococcus pneumoniae
LSFLILSPAGAQESLSFFFVKITDASKTVKNGGQTETQKLVTKMASDFERVENKDSEVGKIVKEKLALSGDITEAKLTEISSALLAFEKEQNPVDLDAEKEKLVNRLSPRFETLEQAIASKDLEKVREAFKKMNSTWTINESVVRDNSTAHYGRVETAISFLPSSMETEPTDESGT

SEQ ID NO: 880 - protein, 334 aa, Streptococcus pneumoniae
MQKNIYFVVLDLHTTDRDKIIQLFKDWTDYSAKLVEGELVKKDGQNALFPPSDTGETVGLNPHRLTLTFGVSASFLKRMNLENKRPRLFRDLPLFPKEQLREKYTGGDIVIHACADDEQIAFHAIRNLIRKGRNAVPLRWSQSGFAAIGDRMETPWNLFGFKDGTANPTKEQDFDRVIWADSKDWMENGSYMAVRRIQMFLETWDRTSLEEQENTFGRYKESGAPFGKKNEFDEVDLSLLPDDSHVCLAKEVDKPLLRRSYSYSDGIDEKTGQFDTGLLFISFQKDPDNFVKVQTNLGATDKMNEYITHIGSGLFTCFGGVEKGGYIGQKLLEG

SEQ ID NO: 881 - protein, 47 aa, Streptococcus pneumoniae
MTGKKGFLFLNCHICMVTTTTCFLKERVESELLIFFYISLNRCLITV

SEQ ID NO: 882 - protein, 1192 aa, Streptococcus pneumoniae
MSLRNKIEQHIKELEGGKFQKLGDAYLSRKYNFNIVSLGSQEGTDKTTKGIPDSYAVENGKYVYIMYGTHKSVISKLEGDIQSVKKKILEENIAEDKVGRLICCHTSSNITIKQKEDLEKMAEPYHLELIGINEIANDLTKIDFQYLAKEYLSISESTEQVWSINDFIRIHDESKTNAPISNDYIGDVSEIINTIKSSEKRIFLISAKPGTGKTRLAIEICSLLDRNKYNIICVKSNNQDIYQDVKRNLNLHKENIVFIDDVNTTQNYISTLGLLNTTSNIRFILTVRDYAKKDVINNIKVYGYNNIEPELIKDDNFKELLNQFSRNDFTNQEIEHIKTISKSNPRIAVIAAKLSSSQDLTNFNDEIDILKDYYEEILNKNNIIYAEQKTLFILSYLKKIRLESLEENQEFNKLLKITDITNTDFKSAVEKLHERELCNIYNDKIVKIADQSLDDYIVIKFLINKKISILEILHELYPVNDQRVVQILNQCSNFIRKESDLEGVSDAVKSYYYNESNFESDELKEKFLIQFGVLLPLEAISHVKNKIDNIESQVYTKTNFINQKDKKGSIEDSVLNIVFVTTRTKYCSQILQLLLKYFDKNPNKISEVYSILEANYGLVTEREYIDYTLAENTISELANLDLTKSYNQELIVTILKQFLKIEIERTEAHEEKFTFGRYKVPDSEKLKQYHRSILKLLANLYNIGSCETRFYIEKMLYDYRRKILTYSESHRNTIFGDLRNIRKLFFNDIKNLSMIGEKIVYALHKAEVKENLPIVFDDYIISDRQKIYNNLTNPNHAWFYDASEIKLQQIANSYSNVWLKIFNFANQFKHSLFMNDNNIELVLFNMFLLSKNDKKIKFLNYMFKSNYHFVNMNPISFLENIEESSMQSVIVSSPESEKYEWQLAYLTQLENVKNEDLQTLKSILEANSLPCYFTILNFERLILKDPSLKELLIQKAGNTNFVISDFIREEEVPKLINLIGVKELKFWYLINLENCQNHSYNLFQKLGEKDVDFSVEVLKKIDELRIGHSNLGYMVLHSISEFRDKKEIYKKFIRFAINRPYYYYNNMIDDIIKNDSQIILEILEETNNEQSAIRLVNLGVEFLENNNQKLILFNLLRAKGFGKKSFQEIHFTPYSHFYTGSHVPVLELEKELLERIKKIFETGIDYINLLLYLNKLIDCKRKAIERELEKEF

SEQ ID NO: 883 - protein, 101 aa, Streptococcus pneumoniae
MNESLDDITHKQFTSNLTTKADNVSVQLFFSIKGCCHITNQGRTYTWNFIYSVVDTNTSSTDTYLKISLAASYSFPYFFTKDWVESPCMVICTKVNDFISF

SEQ ID NO: 884 - protein, 132 aa, Streptococcus pneumoniae
MAISQMKRISLLFSKSSLDDVLKTIQELESVQFRDLKVQDNWSEALEKDEVVFPTIQISHTSNSNHGVIEGNDALIYLMNQQQYLEATVEKLQEYLPKENTFKLVRQPPITTSYKELEKLVKLMLPRVFLKK

SEQ ID NO: 885 - protein, 58 aa, Streptococcus pneumoniae
MNRACIIQPSLVEIQIWLLNHVCKCSDFLSHRMRSLLDRKLDLISLLIKLFPKKNWKN

SEQ ID NO: 886 - protein, 40 aa, Streptococcus pneumoniae
LNGGEFLETEFGHSVLAIQSVVWFSFFCLKSNASSLAHGI

SEQ ID NO: 887 - protein, 38 aa, Streptococcus pneumoniae
LLAGILELENWGKTTELRPTLLSGPVQNKIEALKRAKI

SEQ ID NO: 888 - protein, 91 aa, Streptococcus pneumoniae
MRSQNHNCRPSTRKVGCIGPIFFGHLLNHRKFSYQVLTITLMEEVSLDCLPSGHHVSCQQGSNRYIGDRTCSNSFLIRQFFRQDTTAVAST

SEQ ID NO: 889 - protein, 69 aa, Streptococcus pneumoniae; identical to SEQ ID NO: 318

SEQ ID NO: 890 - protein, 139 aa, Streptococcus pneumoniae
LAAFTITSLKAKTKFHPFKGIDRDNSLSQSCIQFSIPLDIGTKTNWNASDDCLHNPTDGITTTFDLVNIVLDFLFSFLVDNRNFRLGSSLLNFSDCQIFRNIYFLTTKDHDMVGNLHIQLSQEAFGYCTNCHPHGGFTS

SEQ ID NO: 891 - protein, 96 aa, Streptococcus pneumoniae
MTWARMSNFPLAFKAVFNVLRRHDVQPFLVVLIDDIHSNRRPCRLPVANARSKDNLVTLNLHTTTTTVATLTASKVLIDILSCQWKSSWNSLNNSC

SEQ ID NO: 892 - protein, 175 aa, Streptococcus pneumoniae
MHDLAITGSRFDGMANSVAKIEVKTNTIVQLIFNHHLALHLTRMFNQGLCMFQNTLNRTIQSRQESPQFWILNQAILDNFTHPFNQLSFSEGFKNKWINQNPIWLGKGPHHIFSKWCVNACLSTDRRINLSCQTSRNLNKVNTPHIGRGYKASQVPNNATTKSNDSIATSQTLLD

SEQ ID NO: 893 - protein, 56 aa, Streptococcus pneumoniae; identical to SEQ ID NO: 322

SEQ ID NO: 894 - protein, 50 aa, Streptococcus pneumoniae; identical to SEQ ID NO: 323

SEQ ID NO: 895 - protein, 72 aa, Streptococcus pneumoniae
MSTTTKFNRVVTDSHDTNFLAVFLTKEGHSSHFFSSVNIRFHCLNFKSFPDFFVDLLFNRTQFFSSYRLGSG

SEQ ID NO: 896 - protein, 108 aa, Streptococcus pneumoniae
VTWIHSHFNPAVVRIFIVWIVGHVKFFSREIKPFRACQKLISPSDSFVTEVIPDREVPQHFKHGMVTRSLPYVFDVVGTDSLLGIGNTWIFRDNGPVKVFLKRLLPQS

SEQ ID NO: 897 - protein, 45 aa, Streptococcus pneumoniae
  misc_feature 39...40: Xaa is any amino acid
MNGHFLLLFCLFNIFFHLVNIELSKQVLTVLDWETLVQXXIPFIN

SEQ ID NO: 898 - protein, 39 aa, Streptococcus pneumoniae; identical to SEQ ID NO: 326

SEQ ID NO: 899 - protein, 45 aa, Streptococcus pneumoniae
LKNHSNVFTHFINVDFWTVDINSTIENLPSYFSNINSIIHAIETA

SEQ ID NO: 900 - protein, 40 aa, Streptococcus pneumoniae; identical to SEQ ID NO: 328

SEQ ID NO: 901 - protein, 73 aa, Streptococcus pneumoniae
LSPFQHCHSSGSIFFNLHFLNRNILQSFDNPFLGLIRENKIEKFCSQLIGLPQCIHMLIRPQGPIIATYIFWT

SEQ ID NO: 902 - protein, 183 aa, Streptococcus pneumoniae
  misc_feature 3...4: Xaa is any amino acid
MNXXNSRCNHPTWSNFLDILEVDFLGNIVGQKIRSHDLKNPVQVFTVIDMTIHIQVVKTNMVILADRLFQGFILRSTDKFFIKIRLVRSHNLRFNNMDFSTVAVHENKGRHHVDELLPRFIINSKATVAKKSIVAQGFRFDGNFFRKTRQTNHLNIIFCDNPDQIIVFQNGLITNSQFNRLHP

SEQ ID NO: 903 - protein, 71 aa, Streptococcus pneumoniae
MWYFYNTDGSMATGWVQVNGSWYYLNSNGSMKVNQWFQVGGKWYYVNTSGELAVNTSIDGYRVNDNGEWVR

SEQ ID NO: 904 - protein, 40 aa, Streptococcus pneumoniae
LTFIKSWAIEIFCFDWNFLDKNLGLGSFFNNSCLRVFFLT

SEQ ID NO: 905 - protein, 90 aa, Streptococcus pneumoniae
LLLSCRKVIVCFIFSSKWNKNFFNLAFSWNFDNCIRGFFSINSNLFGNITSLWINIVGPCRSYIAILSINCNRIFTTVFCFIFFITNSRT

SEQ ID NO: 906 - protein, 49 aa, Streptococcus pneumoniae; identical to SEQ ID NO: 333

SEQ ID NO: 907 - protein, 98 aa, Streptococcus pneumoniae
LVNCEPLEAYRQLEEAELVGCWAHVRRKFFEATPKQADKSSLGAKGLAYRDQLFALERDWEALPADERLQKRPAPNGRLLCLVPPSVSFSRFKTRKGN

SEQ ID NO: 908 - protein, 138 aa, Streptococcus pneumoniae
LKRNKIWKKTLTYPVEREEITYKRKKAKGKRQAILAQFDSEEVHHRLENCICPDCQGELKEIGASLQRQELVFILAQLKRVNHIQHAYKCQTCSKNNPSDKIVKAPIPKAPLAHSLGSASIIAHTIHQKFILKVPNYR

SEQ ID NO: 909 - protein, 64 aa, Streptococcus pneumoniae
LKIIQQQSATIDSLTNELALLREQVAYLTQKLYGKSSEKSVCPSGQLSLFEEEQNMEEDSDLPS

SEQ ID NO: 910 - protein, 101 aa, Streptococcus pneumoniae
LICQTIKYWHKFHLHIGRCKLLIGLIPILNFFIRADIDCLLVLLSLIDRQNGKQFNLCQWIIASNGLNDSFEIIESLIHRNILSDIICPNQKKNFIYCSTI

SEQ ID NO: 911 - protein, 125 aa, Streptococcus pneumoniae
MSFSCSDSCFSILLLDGDIHENTTFSPLSILFISHRFNSLIGNEVPHLIDNELLISIFFHRFRWFNNVRMPSKDNIRSPIDHLVIKSFLFFSWFQSILNTHLKHDNGDICFLLCPFNFSLHLIFV

SEQ ID NO: 912 - protein, 71 aa, Streptococcus pneumoniae
VVEQIPVGHNSGSFFLFLLLRLLLSPLLRNSISFLTSQGIPWKLSNNKTKPIDKSTASKSIATNPLLLHLR

SEQ ID NO: 913 - protein, 438 aa, Streptococcus pneumoniae
MLKLIIYQFQYSKRQWLGTIPLLFVSSLIVGTSLFGIASSIKTANINASQLFQMLIIFGGTTLFFLISNNIRLLIDIFKKDYQLWTILGASRTQLSLLVSGQFYLMAVIVSSIGTILSFIMADSYYKFLQNLLGRDELPDLVITANIQSILLSIFIVPTIVGIGAYFYSSRILKISSILKPKKKKRKVTVTGFVNISVRLFLWLLCIGSIVSAGFIRNKEIIEKQSSIILFLLIIHILIIQSLSPSIQMFLIKFLMRIFPTENYVINTGFWNLLSNPSYLKSIQTSMSMGVTLISGFILYTQNMYSFMNTANGVNEARASFIAYMSAPIILIITSSISLTILSSNKDIEDIKQLKTLGVSRLQLFKIRIGEAIIHSVLILLVSVIFNLIILILVSIIGQFLGRSLVDISGFWQPSLIVISLLVIFYSITKGFYLFQDR

SEQ ID NO: 914 - protein, 243 aa, Streptococcus pneumoniae
MVNNVAVKVSNLSKEFLLGQDKTVSILKDISLSVNYGEFVSILGVSGSGKSTLLSCLSSLSEPTSGEVVINGVNPYTLKEGKLAKFRRQDIAIIFQNYNLVPALPVLENVTLPLRLSGKSVDSNKVKKMLDSLNFKAELSSLVATLSGGEQQKVAITRAIIADSKIIFADEPTGALDSVSRKLIFETLRNLASQGKCVLMVTHDIELASKTDRALILKDGKISRQIIKPSADELYQALESSKD

SEQ ID NO: 915 - protein, 57 aa, Streptococcus pneumoniae
LALVRKFIDYFFGVLVPFPDLYVFKSCFKFAGSFTDFDTFDWWLDWCRSCSENRFFV

SEQ ID NO: 916 - protein, 52 aa, Streptococcus pneumoniae
MPTILLLKKFYERLITNFFRLKFLFCKEILATNIFNHPLFEPDIRVITIKII

SEQ ID NO: 917 - protein, 49 aa, Streptococcus pneumoniae
  misc_feature 2...3: Xaa is any amino acid
MXXGAFGQGELLLQQSRNSSITEIVSDSWAGAGRRILPLPKSVTPLVSS

SEQ ID NO: 918 - protein, 37 aa, Streptococcus pneumoniae; identical to SEQ ID NO: 346

SEQ ID NO: 919 - protein, 53 aa, Streptococcus pneumoniae
MAGKKGFLFLNCHICMVTTTTCFLKERVESELLIFFYISPNRCLITVYSVLNL

SEQ ID NO: 920 - protein, 72 aa, Streptococcus pneumoniae; identical to SEQ ID NO: 348

SEQ ID NO: 921 - protein, 56 aa, Streptococcus pneumoniae
LLVRKFNIQTFFIQVFILNDFGYTVNGLIVYRLLLTSSILSFNDYSIGSFRTVIVI

SEQ ID NO: 922 - protein, 37 aa, Streptococcus pneumoniae; identical to SEQ ID NO: 763

SEQ ID NO: 923 - protein, 121 aa, Streptococcus pneumoniae
MTAQLPSDALQMALWRRKRPRNVIVHTDRGGQYCSADYQAQLKRHNLRGSMSAKGCCYDNACVESFFHSLKVECIHGEHFISREIMRATVFNYIECDYNRWRRHSWCGGLSPEQFENKNLA

SEQ ID NO: 924 - protein, 38 aa, Streptococcus pneumoniae; identical to SEQ ID NO: 354

SEQ ID NO: 925 - protein, 373 aa, Streptococcus pneumoniae
LTEKIQEHELIKTNQAEKSVQDVLDNCIERVQNNSLKSDRVTSFETPFALLFIFATIAVMLTYGGYRVSAGYISVGTLVSFLIYLFQLLNPISNIANFVTVYSRSKGSSVALENLLAVPKEKFEGGKSVSGRGLNFNHVYFGYDENRPVLKDITCSIFKGQKIAFVGPSGSGKSTIVRLLEQFYKPLSGDILMEQSSIYDFNLKEWRSKIAWVSQNNAVLSGSIRDNLCLGLNRLVTDDELMKVLDLVSLGDEIRSMKEGLDTEVGERGRFLSGGQSQRLQIARTYLKDAEILIFDESTANLDADSEYAIISILYSALKEKTVVIIAHRLSTVKDVDCIFFLEERKITGSGTHKELLENHERYARFVQEQMIE

SEQ ID NO: 926 - protein, 181 aa, Streptococcus pneumoniae
MKLKLLRVDTKVIMGSFLLVLSSLLALLLPLILKGLIDGSSIENIGSKVFQSFLIFIGQALFSSIGYYLFSQSGEKKIAKIRKKVIEGLIYAEKSFFDKSQSGELTSAIVNDTSVIREFLITTFPNIILSLVMVLGSIVVLFSLDWNLSLLLFITLPCMMFIILPLSNISEKYSRRLQEEI

SEQ ID NO: 927 - protein, 225 aa, Streptococcus pneumoniae
  misc_feature 2...3: Xaa is any amino acid
MXXALIPRVSIGSVGLLLLTENYVKGDLKAASRLVQDSLTLLFMFLLPATVGVVMVGEPLYTVFYGKPDSLALGLFVFAVLQSIILGLYMVLSPMLQAMFRNRKAVLYFIYGSIAKLVLQLPTIALFHSYGPLISTTIALIIPNVLMYRDICKVTGVKRKVILKRTILISLLTLVKVSVNRNHPVAVRIFLPTKWTFVELPLCSSCRCHGGWTLYGYESAYLFIR

SEQ ID NO: 928 - protein, 55 aa, Streptococcus pneumoniae; identical to SEQ ID NO: 361

SEQ ID NO: 929 - protein, 52 aa, Streptococcus pneumoniae
MANHLYIVPIQVNHKSSIVNRMLTSITRNPIVSPTCLYASLITSLNFFLIFC

SEQ ID NO: 930 - protein, 58 aa, Streptococcus pneumoniae; identical to SEQ ID NO: 363

SEQ ID NO: 931 - protein, 40 aa, Streptococcus pneumoniae; identical to SEQ ID NO: 364

SEQ ID NO: 932 - protein, 90 aa, Streptococcus pneumoniae
MSKKVLFIVGSVRQGSFNHQMALEAEKTLAGKAEVSYLDYSDLPLFSQDLEVPTHPAVAAAREAVLVEDAIWIFSHSLQLLYPRYSEKLA

SEQ ID NO: 933 - protein, 59 aa, Streptococcus pneumoniae; identical to SEQ ID NO: 366

SEQ ID NO: 934 - protein, 54 aa, Streptococcus pneumoniae; identical to SEQ ID NO: 367

SEQ ID NO: 935 - protein, 86 aa, Streptococcus pneumoniae
LLHPFTRNITCDRHILTLLGNLVNFIHIDNATLCTFDVKVSNLQEFEEYIFHILTHITSLRQSCRIRNSKRYIQALSQGLGKESFP

SEQ ID NO: 936 - protein, 58 aa, Streptococcus pneumoniae
VEIDAFVVVINRHCQGTLGTILTNYIVVQDMEEFNWFWHLRQVCQDFLNQFFSNDFLS

SEQ ID NO: 937 - protein, 129 aa, Streptococcus pneumoniae
  misc_feature 3...5: Xaa is any amino acid
MEXXXTELAGRGFLVWHPKMDEYMEALDGHLDEISERLITLGGSPFSTLTEFLQNSEIEEEAGEYRNVEESLERVLAIYRYLITLFQKALDVTDEEGDDVTNDIFVGAKAELEKTVWMLAAELGQAPGL

SEQ ID NO: 938 - protein, 83 aa, Streptococcus pneumoniae
LITRLLHRVHVLVDDFNPSICITWSSLALIYIFPVLNIIIDRVRQVHIVFLYKSHGLFSVILSIGLIFSIGIEIDTIRNSQNG

SEQ ID NO: 939 - protein, 315 aa, Streptococcus pneumoniae
  misc_feature 2...3: Xaa is any amino acid
MXXTGSLSANFAGSTTASSSSEQNQSSNKTQTSAEVQTNAAAHWDGDYYVKDDGSKAQSEWIFDNYYKAWFYINSDGRYSQNEWHGNYYLKSGGYMAQNEWIYDSNYKSWFYLKSDGAYAHQEWQLIGNKWYYFKKWGYMAKSQWQGSYFLNGQGAMMQNEWLYDPAYSAYFYLKSDGTYANQEWQKVGGKWYYLKKWGYMARNEWQGNYYLTGSGAMATDEVIMDGARYIFAASGELKEKKDLNVGWVHRDGKRYFFNNREEQVGTEHAKKIIDISEHNGRINDWKKGIDEKRVDGVICRLGYSGKEDKEWRIH

SEQ ID NO: 940 - protein, 166 aa, Streptococcus pneumoniae; identical to SEQ ID NO: 371

SEQ ID NO: 941 - protein, 86 aa, Streptococcus pneumoniae
MNRCNSRQAIWKIISTLNRENTHIMLNRQVCFCFVNHISPLNVVIWENLSLEELLYAICICFITHKIAKQTSLTIDNAGIAMNNIR

SEQ ID NO: 942 - protein, 58 aa, Streptococcus pneumoniae; identical to SEQ ID NO: 373

SEQ ID NO: 943 - protein, 55 aa, Streptococcus pneumoniae; identical to SEQ ID NO: 745

SEQ ID NO: 944 - protein, 214 aa, Streptococcus pneumoniae
MLSKEEYIEEIGLIEKQNYVEVELYPLVADIINPTLKNSLSKRYVFGRRKSNMGQIYYGLSNFPDIVILDKNYQNKARKSIEIEEWKKLRGCVEIKSLKHDLITEEKIKSTISNSFEHITGEMGQLIGDLLWYKKVIYTNGIEWRFLSLDDKEEIDNTIVQVVNKRIETEEAGNSFDWWKNIKDLSFNYTDIYLSKDCIQEWDEFVKKVKEIEW

SEQ ID NO: 945 - protein, 45 aa, Streptococcus pneumoniae; identical to SEQ ID NO: 379

SEQ ID NO: 946 - protein, 42 aa, Streptococcus pneumoniae
VDRTDEVSSKHCFEVVDRTDEVSNHTHGKATLTWFELDFRRV

SEQ ID NO: 947 - protein, 478 aa, Streptococcus pneumoniae
MTPIKDKVRRVKTPMMVNPDTDLTISSVQQDYFSLALIGFSLLTGDFLSFSKGDQKTGLSAFIKICHLIKIARLDNKITKQQEYWLYDLLMMSQGEKIQKIKQLKQVTSDILLNTPDFSSYFEKYNFKEEAENIKSYLLAKSMDKSGRLFPSNEFGEFVSPVSFQHGFGGVLFFMNKYYVEEDENTVKEWLTKLENYEAANFLHGYSLLFGKAGFLFGILDRYEKTKERYLIDISKRLVDHLMRVYDNISNLDFALGKSGILLSLMKYCTIFDDKKLANFIKNNINDAYSLLESEDNGDIYSNNFAHGRSGAAYVLKAYTDIFGDSRYQNHLQKFSDGISELLEEKLSSFSKLDNLGLSWCDGVSGLILYLCLIDKERYSEIIYKSQLEMVQQYEAMGTSFCHGLSSLLQTTIYNKNQKVEQFIKKILLTRSYRNNDRLLQFQGEDGINSYFDFGVGNLGIYWTLLGYTFPFELSKGD

SEQ ID NO: 948 - protein, 412 aa, Streptococcus pneumoniae
MHIFLKNRAFRQLTVNEWISSFGDTIFYLAFINYVSSYAFAPLAIFLISLSETIPQVLQLFTGVIADFQKNRISKYISILFIKVLLYSGVTLLLTSTDFSLFSVFFICSMNLISDTIGFLAGYMLTPIYIRLINDDMTEAMGFRQSTSSIVRLIGNLSGGVFLGLFSISTLAFVNVLTFLFAFLGSLLIRNRLKKEEEKIEVPPYVGMSSFFQHLKESMKLLMTMEDVMVLLWILSISQAVLMMVEPVSAILLIHHPFMGLSTGQSLAILIMISLLHVILGGLLSGFLSKKISIRLNIYWSLLMESLIVIDFLRGSFLLILLGSAGDAFSAGVLSPRLQAMIFGIIPEELMGSVQSSINVINLLIPAVLSLALVFLATSAGLEVVAFALIILLLIAAYLVHQMKNLPNQEEV

SEQ ID NO: 949 - protein, 1040 aa, Streptococcus pneumoniae
MTVPDRLPARMRMDGRSIFQQIKNYFDTENKEYFKHPNTYDGISMHLEPNILTSMEHFDLTGFHCECKDFQNQGVCKHWVAMDLYFRSLPQAIQERIGKASHKPSFASQLIPTLPSEELQDELVEEKATAPSLALHGQVEIRNHSLAWTLKLQVEQAPRAYVIKDIAHFIFLIFQKEDYFVSQKIGTIRLSLNQFNQASQNLLLYIKKYFIDRNEHSYFNFSYGINPRDYGRYLETPVSYLNDLVPLFQALDVFQYVTSKAEYPLIFLDDSPFIPEEEIFKVVKSNNHYEIINTAYFGFIIQEKLWIRHNHFHIIKEEHRYFLDKLATWIYHYQENSPLIFSKENKAELMQVCNIISNYVPISIPDELQIHDFIPTFAFSKTRNEIALNMVWSFGEKQVHSKQDLLTLPYTYQASKARKIYHQLLSAGFKEEFHSLSKIKIVDFFLKELPRFRTLGQVQLDESLEKLLVEDPAVIDIFDDESFLSVQFDFSMISEDEVEKAIQALWNQESHYQTKQGKVLVFDDESLKVAQSLQDLRAKFSDGKIKMHKSRAFSLSETFKDNEHVNFSRDFKKMAYDLTHPEEFDIKPYEVKAKLRSYQKEGVKWLSMLDHYHFGGILADDMGLGKTLQTITLLEANLKPDQKALILAPASLLYNWKEEFRKFVPHKQVEVAYGSKTERIKQIEKSATITITSYPSFRSDLEHYQKQSYDYLILDEAQMIKNSQTKTAQALREFDVKTCYALSGTPIENRLEEIWSIFQIVLPGLLPSKKEFSKLSPQLVAKLIQPFVLRRKKDEVLTELPELSEHLYSNELSSSQKTLYLAQLRRMQEMVSGASAYEIKRHKIEILAGLTRLRQICNTPALFLEDYKGDSGKMDSLFELLDTIREKGSRPLIFSQFTSMLDLIEQELEKKEMSHFKITGQTPSDKRQEMVNLFNQGEKDCFLISLKAGGTGLNLTGADTVILCDLWWNPAVEMQAIGRSHRLGQTKQVDVYRLITLGTIEEKIQELQESKKELFNTVLEGQESRSNLSVDDIKEILGVE

SEQ ID NO: 950 - protein, 61 aa, Streptococcus pneumoniae
MMSMVDPIDQTFIVNLKIGKSQVFSQLQFSCHIVVYPSEVHIYQAFVIKLQNHILGPQVLP

SEQ ID NO: 951 - protein, 85 aa, Streptococcus pneumoniae
LPNRTRIDNQLPTSPVTKQLLVNMSINSNITGRMSHQAVKLLLFASMNQLSPPVLIRQMMANSHRQIPKLTMNLKRLIVEHFNFF

SEQ ID NO: 952 - protein, 46 aa, Streptococcus pneumoniae
LIQQVQNPSTPCPWHENISQKPVFIHSYLPSICQNSLQGGGISMNI

SEQ ID NO: 953 - protein, 76 aa, Streptococcus pneumoniae
MIDKVVRNLLLTFLFCKMTKIINFLTTILVKKKKMCYNVSKLREKKKGAMMWVLGFILFIIFFYSNNSKKIKKLRE

SEQ ID NO: 954 - protein, 42 aa, Streptococcus pneumoniae; identical to SEQ ID NO: 755

SEQ ID NO: 955 - protein, 282 aa, Streptococcus pneumoniae; identical to SEQ ID NO: 390

SEQ ID NO: 956 - protein, 38 aa, Streptococcus pneumoniae
MYEEPEVAPVHPTGPTPATETVDSAPGFEAPQESVTIL

SEQ ID NO: 957 - protein, 79 aa, Streptococcus pneumoniae
MGNNGQFTFGYRHDFFQNQLAIFNALVDTFTRRTIDIKTLNTFINEVLNQGTRTLWTYFSLLIITCVEGWNDTFVFFQI

SEQ ID NO: 958 - protein, 42 aa, Streptococcus pneumoniae
LHEVVIPSIDEGKDCKGCKPWFHNREGYTPEGTNLTTTVDFS

SEQ ID NO: 959 - protein, 51 aa, Streptococcus pneumoniae
LFHEEDTEWPSNQRQDNCPESIVDSHEVDDTYQWYKDNLFWKRHSSDKDSK

SEQ ID NO: 960 - protein, 980 aa, Streptococcus pneumoniae
MSYFRNRDIDIERISMNRSVQERKCRYSIRKLSVGAVSMIVGAVVFGTSPVLAQEGASEQPLANETQLSGESSTLTDTEKSQPSSETELSGNKQEQERKDKQEEKIPRDYYARDLENVETVIEKEDVETNASNGQRVDLSSELDKLKKLENATVHMEFKPDAKAPAFYNLFSVSSATKKDEYFTMAVYNNTATLEGRGSDGQQFYGNYNDAPLKVKPGQWNSVTFTVEKPTAELPKGRVRLYVNGVLSRTSLKSGNFIKDMPDVTHVQIGATKRANNTVWGSNLQIRNLTVYNRALTPEEVQKRSQLFKRSDLEKKLPEGAVLTEKTDIFESGRNGKPNKDGIKSYRIPALLKTDKGTLIAGADERRLHSSDWGDIGMVIRRSEDNGKTWGDKVVISNLRDNPEAKDPAAPSPLNIDMVLVQDPTTKRIFSIYDMFPEGRAVFGMPKTPEKAYEKIGDKTYQILYKQGESGHYTVRENGEVYNAQNQKTDYRVVVNPTEPGYRDKGNLYKGQELIGNIYFAHSTKNPFRVANTSYLWMSYSDDDGKTWSAPRDITPGLRKDWMKFLGTGPGTGIVLRNGPHKGRILIPVYTTNNVSHLNGSQSSRVIYSDDHGKTWHAGEAVNDNRQVDGQKIHSSTMNNERAQNTESTVVQLNNGDVKLFMRGLTGDLQVATSKDGGVTWEKDIKRYPQVKDVYVQMSAIHTMHEGKEYIILSNAGGPKRENGMVHLARVEENGELTWLKHNPIQKGEFAYNSLQELGNGEYGILYEHTEKGQNAYTLSFRKFNWDFLSKDLISPTEAKVKRTREMGKGEMGKGVIGLEFDSEVLVNKAPTLQLANGKTATFLTQYDSKTLLFAVDKEDIGQEIIGIAKGSIESMHNLPVNLAGARVPGGVNGSKAAVHEVPEFTGGVNGTEPAVHEIAEYKGSDSLVTLTTKEDYTYKAPLAQQALPETGNKESDLLASLGLTAFFLGLFTLGKKREQ

SEQ ID NO: 961 - protein, 77 aa, Streptococcus pneumoniae
VADRTDEVSSKHRFEVADRTDEVSSKHRFEVADRTDEVSSKHRFEVADRTDEVSSKHRFEVADRTDEVSNIYTARRS

SEQ ID NO: 962 - protein, 67 aa, Streptococcus pneumoniae
MKIKEQTRKLTAGCSKHCFEVVDETDEVSSKHCFEVADRTDEVSSKHCFEVADRTDEVSNIYTVRRR

SEQ ID NO: 963 - protein, 43 aa, Streptococcus pneumoniae; identical to SEQ ID NO: 622

SEQ ID NO: 964 - protein, 92 aa, Streptococcus pneumoniae; identical to SEQ ID NO: 400

SEQ ID NO: 965 - protein, 78 aa, Streptococcus pneumoniae; identical to SEQ ID NO: 401

SEQ ID NO: 966 - protein, 63 aa, Streptococcus pneumoniae; identical to SEQ ID NO: 402

SEQ ID NO: 967 - protein, 39 aa, Streptococcus pneumoniae
LSNSFFLIKFSSSKTSGKKRIVSDNIFIRNKFICHFKKE

SEQ ID NO: 968 - protein, 645 aa, Streptococcus pneumoniae
MDYSKVAAEVIEAVGKDNLVAAAHCATRLRLVLKDEAKVNQAALDNNADVKGTFSTNGQYQIIIGPGDVNFVYAEIIKKTGLKEVSTDDLKEIANKDKKFNPLMDLIKLLSDIFVPIIPALVAGGLLMALRNFLTSPDLFGPQSIEDMYPAIKGFSAMIQLMSAAPFMFLPVLVGISAAKRFGANQFLGAAIGMIMTTPDLGGKEAFWDILGFHVTQTNYAYQVIPVLVAVWLLANLEKFFHKKLPSAVDFTFTPLLSVMITGFLTFTVIGPVMLVVSDAITNAIVWLYNTTGAFGMGLFGGTYSLIVMTGLHQSFPAIETQLLSAYNNNGTGFGDYIFVVASMANVAQGAATLAVYFLTKNAKTKGLSSSAAVSAFLGITEPALFGVNLKYKFPFFCALAGSAIGAFVAGLTHVIAVSLGAAGFIGFLSIKAGSIPMYIIAEIMSFVAAFAFTYFYGKTKAASVFADEAATATAETVTEPTVEAPVVEETDTLQNETLVTPIVGDVVALADVNDPVFSSGAMGQGIAVKPSQGVVYAPADAEVSIAFPTGHAFGLKTRNGAEVLIHVGIDTVSMNGEGFEAKVAQGDKVKAGDVLGTFDSNKIAAAGLDDTTMVIVTNTADYASVAPVATGSVAKGDAVIEVKI

SEQ ID NO: 969 - protein, 142 aa, Streptococcus pneumoniae
MTESYTWVEADRATLSRYRHGQGHLTDQFFSFKVQRPAAKTLIASISTGKGMGPSFDGTPVITSGNQNRINTIKNSFIMSSSSVRISLRKLTSQRNFLRNLSSLILLAAQVAKGDATACSHQRISRVVGQDSHETLSLTEFF

SEQ ID NO: 970 - protein, 50 aa, Streptococcus pneumoniae
MNINNEKVWFAFYLLDMQITRPTPTFNDRRIGLIGKLQELRFLAGNLLLR

SEQ ID NO: 971 - protein, 98 aa, Streptococcus pneumoniae
LIKGYLPNHLALMDLCSKTTCTLDDFAGIAGRRNHRGFFCHIGNGVFLTVDKYLRNQRIRQRKSSHHILTQLVCHSHTHLFILLQTSLSLRTKERLSF

SEQ ID NO: 972 - protein, 38 aa, Streptococcus pneumoniae; identical to SEQ ID NO: 408

SEQ ID NO: 973 - protein, 69 aa, Streptococcus pneumoniae
MIESENHCSASHSNRDYQSQHDNQGRTCQCFIIVPCHKKGSCSVGEITWNQRCQNGQDKDHSRCLIKNT

SEQ ID NO: 974 - protein, 58 aa, Streptococcus pneumoniae; identical to SEQ ID NO: 410

SEQ ID NO: 975 - protein, 42 aa, Streptococcus pneumoniae
MGEPFTHFIDCIDLGINPSYTQVCDRHFTSDIPCTMTSHPIS

SEQ ID NO: 976 - protein, 70 aa, Streptococcus pneumoniae
LSSDSHFIGIKAFVILILGKSNSIVLRIVGLYQDLTCFFSPTCSTCHLSQELEGSLRRTEIRQIQGRIRI

SEQ ID NO: 977 - protein, 56 aa, Streptococcus pneumoniae; identical to SEQ ID NO: 413

SEQ ID NO: 978 - protein, 56 aa, Streptococcus pneumoniae
MVTGIAVLLISHFMLFINNHDTQIFQRSKDSRSGTNNNLGIATLHLAPFIILFTIG

SEQ ID NO: 979 - protein, 56 aa, Streptococcus pneumoniae; identical to SEQ ID NO: 415

SEQ ID NO: 980 - protein, 39 aa, Streptococcus pneumoniae; identical to SEQ ID NO: 416

SEQ ID NO: 981 - protein, 55 aa, Streptococcus pneumoniae
LGLQTKNNPLNQAIPLTKRHMNPHPNFQHSLKFLRNPVTIGLVRLHQGHIYDNLS

SEQ ID NO: 982 - protein, 134 aa, Streptococcus pneumoniae
LGNHFCTICSTTYQAILQFIQIWWCQEDKDSIWNLFLDLKSTLNFNFKENIDSLVQGFIDIGQRSSIVVADIFCVFQHLSLTNQLFKFFTSTEEIVNTVHFSRTLCACRHRYRILKLVFRTLKNLSSNRSFSNP

SEQ ID NO: 983 - protein, 59 aa, Streptococcus pneumoniae; identical to SEQ ID NO: 420

SEQ ID NO: 984 - protein, 58 aa, Streptococcus pneumoniae
LLHLWRSIRVVPSNGGIIQIDQNSLDSLRLQAWDCQIIDCFHSKIWYIIFNRHSGSFC

SEQ ID NO: 985 - protein, 319 aa, Streptococcus pneumoniae
MIGTFAAALVAVLASFIVPIEITLNSANTEIAPPDGIGQVLSNLLLKLVDSPVNALLTANYIGILSWAVIFGIAMREASKNSKELLKTIADVTSKIVEWIINLTPFGILGLVFKTISDKGVGSLANYGILLVLLVTTMLFVAPMVNPLIAFFFMRRNPYPLVWNCLRVSGVTAFFTRSSAANIPVNMKLCHDLGLNPDTYSVSIPLGSTINMAGVAITINLLTLVTVNTLGIPVDFATAFVLSVVAAISACGASGIAGGSLLLIPVACSLFGISNDIAIQIVGVGFVIGVIQDSCETALNSSTDVLFTAVAEYAATRKK

SEQ ID NO: 986 - protein, 791 aa, Streptococcus pneumoniae
MWNKNRQLRKVKKILNQINRRKEEMALLTDEELAAKTQEFKRRLTAGETLDDILVEAFAVVREADKRILGMFPYDVQVMGGIVIHQGNVAEMNTGEGKTLTATLPIYLNALSGQGVILVTTNSYLAKRDAEEMGKVYEFLGLTIRLPFADDEEEKITPKEKKEIYSADIVYTTNSGLGFDYLIDNLASSEEQKYMPEFNFVLVDEIDSVLLDSAQTPLVISGSPRVQSNFYGIIDTLMTTLVDGEDYIFKEEKKEVWLTNKGAKIAEKFLGIDNLYAEENNVLARHLVFALRAHTLFKRDKDYIIRKGEKDQELVLLDQGTGRLMEMTKLQGGLHQAIEAKEHVKLSPETRAMASITYQSLFKMFNKISGMTGTGKVAEKEFIETYNMSVVRIPTNRPRQRIDYPDNLYITLPEKVYASLEYIKQYHAKGNPLLVFVGSVEMSQLYSSLLFREGIAHNVLNANNAAREAQIISESGQMGAVTVATSMAGRGTDIKLGKGVAELGGLIVIGTERMESQRIDLQIRGRSGRQGDPGMSKFFVSLEDDVIKKFGPSWVHKKYKDYQVQDMTQPEVLKGRKYRKLVEKAQHASDSAGRSARRQTLEYAESMNIQRDIVYKERNRLIDGSRDLEDVVVDIIERYTEEVAADHYASRELLFHFIVTNISFHVKEVPDYIDVTDKTAVRSFMKQVIDKELSEKKELLNQHDLYEQFLRLSLLKAIDDNWVEQVDYLQQLSMAIGGQSASQKNPIVEYYQEAYAGFEAMKEQIHADMVRNLLMGLVEVTPKGEIVTHFP

SEQ ID NO: 987 - protein, 510 aa, Streptococcus pneumoniae
VSNKLHILQIGNRNWSHYYEIPENIEWHFFWPGSTTAIKKVMKMEGIRTFSGVVIENPDYLPDLLPLINILTPYTIFYSDICASYSPLVEEFLKKTCAQVTDFSNPRELLRILSKALFKGQYGDKLTPIDMVVNPYFAGSIRYNGYENLELVGSYGEDFRPLISWKYNIRASEWNPIELWLEYEKDLSCDIRIVVRNIQDGSTADFIKERIFTTDDMEAAILLDDDFSSFISVSLEAKGNGRLKIGALHQRLTRYQFGKFVLGGNIIRSKNREEINYFFYPGDFKPPLNVYFSGYRRAEGFEGFGMMKSLGSPFLLFQDPRIDGGAFYLGDDDFENAVRRVIQHHLDLLGFSNKELILSGISMGTYGALYYSSDFEPKAVIVSKPLTNLGLIAERGRLEAPGLFPTAFDILRHHSQGKADIDSINILNARFWERFRGADFNQTIFGLSYMKEEDYDPIAYDSLVDSLYSTGARIMVKGTSGRHNDDNDSTILWFVNFYKMVLEQEFGRKY

SEQ ID NO: 988 - protein, 524 aa, Streptococcus pneumoniae
MYYFIPFLESMNQSWQVDIVPWYQTTHRLEFDDVLHQIRIFKREGIKSKIVLLPYHPHMRYLLHRQDLLEVEAFSVFDAIQDIENEEIYPLQLKDLAWDEDCDFIYTPFLIAVKQKGELHAHIEFGTEGFISYITYFKDNQVDFICYFDDRGFLSSLVKYQDNQAVSRYYYNSNAEWQIKEYLQGIHTKVEVNPRFSHRFRKSTYQSMDEVVWEFFEKFLTAEYKEGESFVLAAQTKYQNQLLKHLPEHADKILTFFIERNQEDDLNLHHQAVKQAKILISDRQDFLERLKQHYPQFTYKMHHLPSFDTRLKLGVSQRVKESKLYVQLDLNTPLNSEALYEVLNFVSQNPLTEIVFATFNAEGYQIEALQKHLFTLISERLNFRDLLKESIISGAENKLEENKEENYRFQIVNLNDEIGLIRELEYTRLIVDLNPIANIYTQIAGISAGIPQINLSESEYVTHLQNGYILSDLSEFSKAGHYFLDTLEHWNQALIHSIDKIRQNTGNQFVQKWERWLEEAKSEQ

SEQ ID NO: 989 - protein, 408 aa, Streptococcus pneumoniae
LKKKLKSVVVKRVMWTICFIFVYILGSRLTLPFVNVNDTSFLGGNAAFLAFSTAMTGGNLRSLSLFSVGLSPWMSAMILWQMFSMSKKLGLGNLPLEIQERRKMILTFIISFIQTLAITLNLPIQEGVNHDLVLILNILLLISGTFFLVWLSDLNSLLGVGGSVVILMSSMIVSVPENIVRSIIDLHVNLLFIISLLLISIAFLYIAVRVQKARYRILVNKIMIHNRFKRYSYFDIMLNPAGGMPFMYAISLVSIPQYLLMLLHIFVPKTRWVDNWIAEFTIGRPVWVYTYIIVLFLLGIAFAFVNMNGEQIADKMKKSGEYIYDIYPGEDTALYINRLVLRFAVIGSIYILLMAGIPMLIILYEPRYMQLSMLPGLFLMFNGMIFNVKEEINALTLNESYRPLVERK

SEQ ID NO: 990 - protein, 335 aa, Streptococcus pneumoniae
MKINITNIYGMSGQSTALIAQNETVKIAKKLDFHELSFYFYNIYSDSEGELNSRLDGVLAKLGYGDIVVYQSPTWNGREYDQAFIRKCKILNTRIITFIHDVPPLMFPSNYYLMSEYIEMYNQSDLVVVPSEKMKERLIQEGLTVQKIIIQGMWDHVHNYPLKQPSFQKKLSFAGSVERFGHLSNWSYSTPLDIFSESNYENSNPRVSFKGWKTDPELLFALSEGGFGLVWGTNENPADEEDYYRLNISHKVSTYLAAGIPVVVPSYLSNASFIKEKGLGYVVDSLEEANRLVEETTVEVYQQMVENVSKVSYALKEGYFTKKLLTDAIMQLLDI

SEQ ID NO: 991 - protein, 1072 aa, Streptococcus pneumoniae
MKAIVLAGDKNYLTPILTTIKSILYYNQNVKIYILHQDIPSDWLQELKIQVEKLGSVVEGIYIGDAIDSEWKTQAHISPIAYARYLISRLITEDRVVYLDSDIIVNGDLSPLFELSLGDYSLAAVRDVDGNGFNSGMLVIDCQKWREKDVTSMLFDKTVEYMSYLDHTDTDGFNGDQTIFNLVFQNHWLELDKRFNFQVGHDIIAFYSHWDSHFELDEEPLIIHYTTYRKPWTTLMGYCYRDLWWSFHDVTFDQISDHYQGRFAVKRVYDFHDINLFTFTDSQDLLYIDELAQSLLDIAFHIGAYTDMGDILLALDKYPNVYLYPSMVGAVIDEMIEKSDAYLDIHKGSSMDFIVNRYTSAGRPVLTFDVTNKNQLEEIVVPSQSPLEMIKVIKKLKSDKMETKAIVFGANYQYADKVLTTIKSICCHNRGLRFYLINSDFPTEWFYNLNRKLTKLDCEIVNARVNSSHISQYKTNIHYAVFLRYFISDFVEEAKVLYLDCDLVVTRDLSPLFDLELGDYPLAAVKDLGGQIYFGEHIFNSGVMLINNRLWKQEEVRKQLIEMTNELHDKVAQSDQSILNLLFKDRWLALDFKYNCITLHTHFSDYRPESGTYPPIIHYLTERKPWGLYECSIYRDVWWYYNAQDWSDMSQVTPSLTKDQVSQYTGVQYSALVYTFSSDLRNMGYLIENLPDVKFYVAAPVMVADSITDLLAYPNVSVLSDIAGQPPLIDSLVEGCDFLLDINADIEVDGIIERFRQAGKPVFAFESVVHGEQGQFLYDQAHPEEMVLAIEAYCQNGELPVKKFQSYPKVLDIQQSLDYILEHHTSVIRYGDGEMDIMMGHGIPYQDYDETLAEQLRSMIQLESSPELLVCLSDVFEGLERYNSESVNFWKKHLEHYKDAYQQYCTASFYGSTFISRPYMDLKDKTASVAHFEKLKQLWDERDILIVEGENSRSGVGNDLFDNAQSVERIICPSRNAYSKVQVIQEAVEKYADGKLVFLMLGPTAKVLAYHLSQKGIQAIDLGHVDSEYEWFKMGATSKVKFSHKHTAEHNFDQEIQFVEDEIYNKQVVVRI

SEQ ID NO: 992 - protein, 402 aa, Streptococcus pneumoniae
MTDKASKKAIVLGADSNYMDKVETTIKSVCSHNRDIRFYIFNSDFPTEWFQLMNKRLSVLNSEIINIKITDDTISHFHLPTPHLSSATYLRYFIPNFVFEKKVLYLDSDIVVTSSLTALFDIDLDGYPLGVVPDIPTTDEEFNSGVLLIDTNRWREEDIYRQLFELTIAHHEHVYGDQGIFNILFKDRWKRLDITYNLQVGVDAHRYYMGDYDWYELFEGVPCIIHYTTENKPWKHFRFNRFRDVWWFYYGLNWNDILLRTHVLKETFLELISPISKHVSIFTNTGDIESIGYLLEKLPDVQFHIVAPTYFSPNVIELQRYSNCYIYPCADPKMKQDIIDKTDICLDINYGPAMDQMLQEMVRRGKTIYSFDCTNHFFNGESTVFTVDEIDELIRSVKELKM

SEQ ID NO: 993 - protein, 197 aa, Streptococcus pneumoniae
LKDLVSVVIPVYNVENYLEECIQSVLNQTYTNLDIVLVNDGSTDASAEICARFAEIDGRVRVFHTENRGAALSKNFGVTQALGEYVLFVDSDDIAEKRMVETLYRQVEETGADIVIGNYFLYDENDGQYKLYVLERDFCIEELSAQELIDRQAGKWHLNASAFIMPVFKLFKKDLLLQVPLLMVGALMMKQRFIDCS

SEQ ID NO: 994 - protein, 1103 aa, Streptococcus pneumoniae
MRGGVDTTQVMTETVEDKVSHSITGLDILKGIAAVGAVISGTVATQTKVFTNESAVLEKTVEKTDALATNGTVVLGTISTSNSASSTSLSASESASTSASESASTSASTSASTSASESASTSASTSISASSTVVGSQTAAATEATAKKVEEDRKKPASDYVASVTNVNLQSYAKRRKRSVDSIEQLLASIKNAAVFSGNTIVNGAPAINASLNIAKSETKVYTGTGKDSFYNIPIYYQLTVINDGSKLTFTYTVTYVNPKTKTLGNISKKMSNGYSIYNTGTSIQTMLTLGSGLGKPSGVKNSITDKNGKQVRPYNTSTMTMWRSGYTWANGAQMNGFFAKKGYGLTSSWTVPITGTDTSFTFTPYAAKTDRIGTNYFNGTRKVVESSTTSQSLSQSKSLSVSASQSASASASTSASASASTSTSASTLASTSASTSASTSASTSASTSASTSASTSASTSASTSASTSASTSASTSASTSASTSASTSASTSASTSASTSASTSASTSASTSASTSASTSASTSASTSASTSASTSASTSASTSASTSASTSASTSASTSASTSASTSASTSASTSASTSASTSASTSASTSASTSASTSASTSASTSASTSASTSASTSASTSASTSASTSASTSASTSASTSASTSASTSASTSASTSASTSASTSASTSASTSASTSASTSASTSASTSTSTSASTSASTSASTSASTSASTSASTSASTSASTSASTSASTSASTSASTSASTSASTSASTSTSTSASTSASTSASTSASTSASTSASTSASTSASTSASTSASTSASTSASTSASTSASTSASTSASTSASTSASTSASTSASTSASTSASTSASTSASTSASTSASTSASTSASTSASASASTSASTSASASASTSASTSASASASTSASTSASTSASTSASTSASTSASTSASASASTSASTSASTSASTSASTSASTSASTSASTSASTSASTSASTSASTSASTSASTSASTSASTSASTSASTSASASTSASASASTSASASESASTSASASASTSASVSTSESTSTSGSTNSRPQETITNSRQELPNTGEKQSVKSGLLGLILGLTGLGLVAKRRKRDDED

SEQ ID NO: 995 - protein, 126 aa, Streptococcus pneumoniae
LKAFVEAHPDAFLREIAARFDCALPSVWAVLKQIKVILKKTTSFKEQKPEKVSEFLDILDNLKDLPVLYIDETGINRYLYRPYAGAPRGEKVYDKISGRRFERTNEVEQKLNGSFLIRYIDSQIRE

SEQ ID NO: 996 - protein, 47 aa, Streptococcus pneumoniae
MAYSTDFKQGALDSIKEGHRHVEAAKVFDVGVRTLFTWEKKDVNKGT

SEQ ID NO: 997 - protein, 72 aa, Streptococcus pneumoniae
MKIKEQTRKLAAGCSKQCFEVVDETDEVSLKHCFEVADRTDEVSNHTYDKVKLTWFEEIFEEYHTKKPCSSR

SEQ ID NO: 998 - protein, 344 aa, Streptococcus pneumoniae
MKKSDVLDLIKYHYEGRETEFRNQSIAIARNFNKHGDTQIAQYIMGLMSQSDRFMPQIENPSEYLTPAKLDIGPLPLPLSIMNDLKGIINAVNHHIGINKFLFVGSPGTGKTESVKQVARLIGKELLVVDFSHLVDSKLGQTVKNLATLFNEINNLPFKQNYIILFDEIDSIVLDRVNQNDLREMGRVTSAFLKELDRLSPEIVLIATTNLFENLDKAVTRRFDAIIDFDRYTDEDKVEVATIILNELLKQFKNVARDLKLFKKIINSANVIPNPGDLRNSIRTSLAFSDPSDPHDYQKRLLRSLHNGRNLSISKLSKLGFTVREIEILTGISKSSVSRELSED

SEQ ID NO: 999 - protein, 39 aa, Streptococcus pneumoniae
MRFIVGIFISFSPEIEFLSSLKFLTDFVEICLLWQVMTP

SEQ ID NO: 1000 - protein, 256 aa, Streptococcus pneumoniae; identical to SEQ ID NO: 439

SEQ ID NO: 1001 - protein, 271 aa, Streptococcus pneumoniae
MMGTNSEEGFLDDFEGPQVAVSVKDFSIADTPVTNQEFAQFVKETGYKTLAERQEWSFVFILFVPEAEREGYPHPAGAPWWLQVSNACWKHPYGENSNLVGLEDHPVVYVALEDALAFCNWSGMSLPTEAQWEYAARGGRQSEYPWGDTLLEGGYYHANTWQGRFPYENTALDGFIGTAPVYEFLPNDFGLYQMIGNVWEWCRNPRYTLLASFNEDDYELPKYGIQDEEYAIRGGSFLCHCSYCNRYRVAARNGCISTSTSSHLGFRCLKE

SEQ ID NO: 1002 - protein, 491 aa, Streptococcus pneumoniae
MVQTKQPNIILIVVDQMRADALSLNSKDKLVSTPTLDMMASVGYNFENAYSPVPSCVPARAALLTGLDQDKSGRVGYQDEVPWNFTNTLPKVFKDMGYQTECIGKMHVFPSRQRLGFDHVLLHDGYLHVDRKYDKAYGSQFDYASDYLAFLKGKVGYDVDLIDDGMDCNSWEARPWDKDEKLHPTNWVVSESISFLQRRDPTVPFFLKMSFEKPHAPLNPPKYYFDIYMERLPQFLDLHIGNWEVLEKQIPSIYALRGKLKEDDQRRMVAAYFGLITHIDHQISRFLTALKEFRHDKDTIIWFVSDHGDQLGEHYLFRKGYPYQGSIHIPSFIYDPAGLIAGNRGTIKQLVKIQDIFPSLVDLAGGTTTDELDGRSVKNLLFGQYEGWRTEFHGEHALGKDSSQYILTDQWKFIWFPVLNHYQLFDMKKDPHEMNDLYPSEKYQPIVRQMKKKLVDFLRYREEGFVVDEELVPVELSKITPTLTKTGDSQS

SEQ ID NO: 1003 - protein, 451 aa, Streptococcus pneumoniae
MNTMLDKMQEKLSPIAMKVENQKFLVALRDSFVGTMPVIMTGSIALLLNAFLVDLPQQFHLESITKTFQWLVDINNLVFKGSIPIVSLLFIYCLGVNIAKIYKVDTVSAGLVSLASFVISIGSTVTKSFPLANVGDVKLDQILQGIDNLAFDGKNLMVTIGNVIPGNHINARGYFTAMMIGFLASIIFCKVMKKNWVIKLPDSVPPAIAKPFTSIIPGFMAMYIVAILTYVFHLLSNDLLIDWVYKVLQTPLLGLSQSFFAVILMIFLNKLFWFFGLHGGNVLAPIMEGLFGVAMLANLDAFQKGEPIPYIWTSGSFGAFVWFGGLGLVLAILIFSRNSHYRKVAKLGLAPVLFNIGEPVNYGLPVVLNPLLFIPFVLSPVFMATVAYWATSWGLVSPVTQNVTWVMPPILYGFFSTAFDWRAIILSVVCLIISVLTYFPFVKMADKTELS

SEQ ID NO: 1004 - protein, 105 aa, Streptococcus pneumoniae
MNESNLESVMGLIMYGGEAKSNAMEAIQAAKKGDFSKANRRLADANAALLQAHKAQTEMLTREAQGEKTSISLLMVHAQDHLMTSLTFVDLAKEVVEVYERFEKN

SEQ ID NO: 1005 - protein, 105 aa, Streptococcus pneumoniae; identical to SEQ ID NO: 444

SEQ ID NO: 1006 - protein, 298 aa, Streptococcus pneumoniae
MKRLISANPSEILQMNAEELKQSILASEGRVVLSENVVTRETFVGDITNSEIARAFGADMILLNCVDVFEPKIYALDSSGDDVIHRLHQLVACPIGVNLEPIDPSAKMLEETQEIVAGRVASVETLNRIEELGFDFVCLTGNPGTGVSNREIIKAVQTAKENFSGLIIAGKMHGAGVNEPVAELSVAEQLLEAGADVILVPAVGTVPAFHDQELREVVDLVHSKGGLVLSAIGTSQETSDTDTIKEIALRNKICGVDIQHIGDAGYGGLATVDNIYALSKAIRGVRHTVSRLARSVNR

SEQ ID NO: 1007 - protein, 420 aa, Streptococcus pneumoniae
MEKLLQEKLLPVAARLGNNKALVSIRDGITLTIPLLLIGSLLMVIASFPIPGWEKYLGDIGVADYLWKGVDSSFGLLGLVASFGIAYFMARQYKVDGIPAGIVSLSSFITVTPFIRGEAGAGMPTAFMASKGLFVAMILGLINGYIYQWFINHNIQIKMPDGVPPAVSKSFSAIIPGAVTIVGWLIVYATLDKLSLPNLHEIAQVALGGPLGLLGNNVIGLLILIFLNSSFWFVGLHGGNVVNAVMKPLWLANLDANKVAYQTGETLPNIFTSVFMDNFVFIGGGGATIGLVLALGYLAHKKKASKQLKTLAPITVIPGLFNINEPAMFGVPIVLNILLLVPFILAPMFNLLVAWGAMASGLVPLTYTDPGWTMPPVISGLLATGSISGSLLQIVLIVLDVLLYLPFVIAIEKRFKLLED

SEQ ID NO: 1008 - protein, 392 aa, Streptococcus pneumoniae
MTLSKKQLQLRAKILETVYTLGPISRIEIATKTGITPATTSSITNDLIKENILLELGEDEHDTSVGRKKILLDIQAKRFYYIGCELSEKHFTFALGDNLGNILKEEKEIVTKQLIQEKGNQLINQTLKQFLNNCSDYEIEAIGIALPGRYLDDYKITTNNPLWQHIDLEMIQSHFDKPLFFSNNVNCMAIGKRLFSRQQNDPNFAYFHFARGMHCSYIYDGNIYGKGNLMIGEIGHTVVSSEGEECSCGRKGCLQTFAGESWLIKKSKILYHQSPYSLLPSLVKNADDIDIQVILTAYQLGDTGIITLIHQALLYLSQTILNISMMIDSQKIYLHSPLLTNQHIIQKLYSEMNYKPKLLYNRLPEVIIEPYNDFTAAHSAIALCLYHTILHS

SEQ ID NO: 1009 - protein, 84 aa, Streptococcus pneumoniae; identical to SEQ ID NO: 448

SEQ ID NO: 1010 - protein, 53 aa, Streptococcus pneumoniae
MYLLLLVVKDHIALIDKEMHVWRPNCILRDLTNFFIKRNHIVTHKTNGSTTKR

SEQ ID NO: 1011 - protein, 39 aa, Streptococcus pneumoniae
VLTLMNHFIKEIQGISINHLTILIKNSIFKLNLKNRIIG

SEQ ID NO: 1012 - protein, 83 aa, Streptococcus pneumoniae
MKIKEQTRKLAAGCSKPCFEVVDRTDEVSSKYCFEVVDRTDEVSSKHCFEVADRTDEVSNHTYGKATLTRFEEIFEEYKGVPR

SEQ ID NO: 1013 - protein, 37 aa, Streptococcus pneumoniae; identical to SEQ ID NO: 453

SEQ ID NO: 1014 - protein, 49 aa, Streptococcus pneumoniae
LHLGKSILSLPVKGKDLEFLVHLFVINHWIGSPSRTSTFCRCKVLNGME

SEQ ID NO: 1015 - protein, 56 aa, Streptococcus pneumoniae; identical to SEQ ID NO: 455

SEQ ID NO: 1016 - protein, 79 aa, Streptococcus pneumoniae
MLEEGTKDQLAELTYPFGRGVNLSFGIKDVPKLYQKVMEANYPIYRLLTKRKFRVSDPYIYPHKFAVLDPDGYFLRFSE

SEQ ID NO: 1017 - protein, 117 aa, Streptococcus pneumoniae
MIACRHDICKSQKGLEHPFCIIRRLTRDFNQRPVCIVEANIFCLKITPQIITNMIVARTVKSSKTGITLTTSMCKRDNHKITWFHRRNGFPSFFNNPNRFVSTIFMSSFRFWITVPP

SEQ ID NO: 1018 - protein, 69 aa, Streptococcus pneumoniae
MNMNKDQIAILNGADNLNLTLWITLKEICKEGCKSFFPVRNTCRMLDIGIPYRLGLSLSNSSVLNGMDV

SEQ ID NO: 1019 - protein, 90 aa, Streptococcus pneumoniae
MHKLRIFVNQLCRRFGIILGPFLVLGFQVLTQELELAIFFDLREEVLLQVIPQVCHFCYLRKEFTTLNQHELTSHDHVLTRHFQTHGLQG

SEQ ID NO: 1020 - protein, 71 aa, Streptococcus pneumoniae
MQVTIEADSGLFLLSPVVQLLKVEIDVKQVTMSLDNLGRTKLSHQTFWVAGVEVHVPFNNADALPKWRIRT

SEQ ID NO: 1021 - protein, 49 aa, Streptococcus pneumoniae
MKNGIDFAHIAITDFFHNQAIAMGIAHYNDGLLCHDGNTSKSFLTAKAR

SEQ ID NO: 1022 - protein, 71 aa, Streptococcus pneumoniae; identical to SEQ ID NO: 470

SEQ ID NO: 1023 - protein, 44 aa, Streptococcus pneumoniae; identical to SEQ ID NO: 471

SEQ ID NO: 1024 - protein, 130 aa, Streptococcus pneumoniae
  misc_feature 123...124: Xaa is any amino acid
MYNKVIMIGRLTSTPELHKTNNDKSVARATIAVNRRYKDQNGEREADFVNMVLWGRLAETLASYATKGSLISVDGELRTRRFEKNGQMNYVTEVLVTGFQLLESRAQRAMRENNAGLKGQIWXXIHSLIN

SEQ ID NO: 1025 - protein, 98 aa, Streptococcus pneumoniae
MQFTRTTHHPKTLFTTKFAWENEIPFWHHGTRKSHNGFQPNTRIRCSCNDLHYLVTCDCNLADVEVVTVWMSYHLDNFTNNKLRFLIINNFFCKTFRL

SEQ ID NO: 1026 - protein, 74 aa, Streptococcus pneumoniae
LTALCNFKQARNLKNVPSYCFPIFFEENTGYLAFAFHIQFGISAIFHDDHKDITDMFFVIRKNHCFLFLLFQSC

SEQ ID NO: 1027 - protein, 43 aa, Streptococcus pneumoniae
MKIKDQTRKLAAGCSKHCFEVVDRTDEVSSKHCFEVVDEADVV

SEQ ID NO: 1028 - protein, 63 aa, Streptococcus pneumoniae
MYYSVDDVVSNAFKKRMILDSFFAFNCSGTMKVSTWVYDKGEWYYVSSSGSMIANDWVKDNGK

SEQ ID NO: 1029 - protein, 44 aa, Streptococcus pneumoniae
LTWILTKIARKDSLQLFELEANLISFLLVMSVDLAPFCFKEENF

SEQ ID NO: 1030 - protein, 37 aa, Streptococcus pneumoniae
MEDIDEDELLIFEKVLGQLQANIKGIGGENKEISQKN

SEQ ID NO: 1031 - protein, 100 aa, Streptococcus pneumoniae
LHLRTCFVRQTNKLSPLINRTRLQFHQTILHYTLNQITSNRLGNIEFLLDIFNQDQVLVFLAIIQKTHNLTLRPTHKFNAATFGFLLHHQVNLMTKTLKD

SEQ ID NO: 1032 - protein, 65 aa, Streptococcus pneumoniae; identical to SEQ ID NO: 481

SEQ ID NO: 1033 - protein, 61 aa, Streptococcus pneumoniae
MQDLLFHFYSYRLNLTFFFFELLICLLNSEFDLSKFIFVYFDEYFHEDSLKMNLHQFSFSF

SEQ ID NO: 1034 - protein, 43 aa, Streptococcus pneumoniae; identical to SEQ ID NO: 483

SEQ ID NO: 1035 - protein, 37 aa, Streptococcus pneumoniae
LTDFHDFKFIFFENLFKSRQLYLQSQNSVLSNLWLAT

SEQ ID NO: 1036 - protein, 671 aa, Streptococcus pneumoniae
MKKLFILISNLLASLFFVWVFTIWTDTYVSHYYPNVVVHDSSPETTFQHVATRLEKLAEETDSFIAIQHQDPNSEGTTVFSYTTFGDGKLPDGLQEKNLEDAQSSSVETNYFVFDGHLDIHLLREELSQLGLTNMHLTIPSKLSTLMAIFSNGFQLISLLIFILTFVALTLISQISQLRSSGIRLISGEKRWSIFLRPVGEDLKAIAVGFSLAGVLAILMQKILSLPTQSLMTIGAGLLSYNLILLSISLFFAQLFAVGIKKIHLMQIIKGQVPVRGIISLILIGQLLAIIIVTLGIGSSLKYSQAWQQHRIGQEIWSQERQLITLSISREGTSPGFDEQAQRKLRTWYQLMDLAVSEQKAFLSRHQLIDRTLQNGMASSKNLITSTEWHDYNPNGNVLIVTPQYLERQNIPVDTTIEQKMNHLNVGEFVLLLPEHLRSEEEHYKSVFEDDLTSRMSSQDERQQMTATVGYLESGQDRFVYNTTPISYQQFLKDPIIIVITPQSTGPQSILFWIDAVQNYVLFNQLSDAQELIQRQGIENWVSEMQTGYHNYITLLDNIQRERWVMLAGAVLGIATSILLFNTMNRLYFEEFRRAIFIKRIAGLRFLEIHRTYLFAQLGVFLLGFVASVFLQVEIGVAFLVLLLFTGLSLLQLHVQMQKENKMSMLVLKGG

SEQ ID NO: 1037 - protein, 124 aa, Streptococcus pneumoniae
VLKWCILRINHHISRKVDNFLEGTRAHIKGQAHTAWNPLEVPDVRYRSFQFDMSHTLTTNFRTRYFNPTAVTNNSSVTNAFVLTTSTFPVFCRTKDHFIKESFTFWFQGTIINCFRFFDFSIRP

SEQ ID NO: 1038 - protein, 39 aa, Streptococcus pneumoniae; identical to SEQ ID NO: 489

SEQ ID NO: 1039 - protein, 52 aa, Streptococcus pneumoniae
VDSLFLSLGEESNQEINLQESFSSTDCNPTLISPETTVAQGLCQDIIYRPFT

SEQ ID NO: 1040 - protein, 175 aa, Streptococcus pneumoniae; identical to SEQ ID NO: 494

SEQ ID NO: 1041 - protein, 78 aa, Streptococcus pneumoniae
MDNLCFHNAWTDWASILKQAVVTEDDMTKQNDFFLGIIDAEFHNCLGNFAINESDMSKKITSHCVLCLVWPRQLDDLS

SEQ ID NO: 1042 - protein, 88 aa, Streptococcus pneumoniae
MQHNPRIEQALIELRINFANSVCQTHHGRRMIGQARFKGMVVGLGSWIGVEFLIILGVEISDNPLPDRIFNFENHLRHVVTNFLDINW

SEQ ID NO: 1043 - protein, 49 aa, Streptococcus pneumoniae
LIDLRGIVINFSASFHVDNLTCGKGLNVMRLGIPELPINLATIILEGKG

SEQ ID NO: 1044 - protein, 49 aa, Streptococcus pneumoniae
MDALVLQKNQETIQQIAVKIRFLDGHDYYSLIDIDNRRTNQTVFPFVNF

SEQ ID NO: 1045 - protein, 41 aa, Streptococcus pneumoniae; identical to SEQ ID NO: 497

SEQ ID NO: 1046 - protein, 37 aa, Streptococcus pneumoniae; identical to SEQ ID NO: 498

SEQ ID NO: 1047 - protein, 98 aa, Streptococcus pneumoniae
MKQTVKKLALVASIAATLGGGVSVASAAVQYPEGGVWTYGSGNGGAYSNYYHPSKYHSSTVVSRKTGSSDKGYAGAGGTSRAWIRTSWGEKVAFYYNV

SEQ ID NO: 1048 - protein, 70 aa, Streptococcus pneumoniae
MNQENLFLLQEIKDKLLIIIDTVHIAVDFWEDIEPRLGFNGRQTWNILNGIIDEISLLVDSSTRKKQFID

SEQ ID NO: 1049 - protein, 45 aa, Streptococcus pneumoniae
LLGQNVRAKAHIGQHIEPFDIALNMSLRARQDHPTHTETCYAVGF

SEQ ID NO: 1050 - protein, 55 aa, Streptococcus pneumoniae
MSVHYHAVIDFIRKDNQIVLTGNLNNLQQEFLRIKGSSWVIWIDKDDCLGIGSDF

SEQ ID NO: 1051 - protein, 74 aa, Streptococcus pneumoniae
VTYNRIRQTSHPLCNQKCQQQGDAYNPDSLVNKNSFDITILITNCLHDTYFLGTLHDIDVNNDTNHNRCYHNSL

SEQ ID NO: 1052 - protein, 41 aa, Streptococcus pneumoniae
LIRQHETVAVLHVIFIIDYTYNLRLKLSNLTSFGSTFYNAG

SEQ ID NO: 1053 - protein, 43 aa, Streptococcus pneumoniae
LHTSFRSSVGHSHTWHQDIVRPILFSRFNDSIVILWQNCPTFN

SEQ ID NO: 1054 - protein, 69 aa, Streptococcus pneumoniae
LRLAKLVPSLKIALKSFSLFTRKFFFKTQLHLLNYYYYTIFFKKANHSKVLDNFIRKRSWKNNFPNSLY

SEQ ID NO: 1055 - protein, 120 aa, Streptococcus pneumoniae
LKAEQQAIKNIQFLEQDLPKNPLEKEFDCLAVSRVLHHMPDLDADLSLFHQHLKEDGKLIIADFTKTEANHHGFDLAELENKLIEHGFSSVHSQILYSAEDLFQGNHSEFFLTVSQKSLA

SEQ ID NO: 1056 - protein, 72 aa, Streptococcus pneumoniae
MKHDFNHKAETFDSPKNIFLANLVCQAVEKQIDILSDKVILDFGGGTGLLALPLAKQAKSVTLVDISEKMLE

SEQ ID NO: 1057 - protein, 65 aa, Streptococcus pneumoniae; identical to SEQ ID NO: 511

SEQ ID NO: 1058 - protein, 117 aa, Streptococcus pneumoniae
  misc_feature 111...112: Xaa is any amino acid
VTENPAPFVFTVSINSFFTVVAFTTGTDARNQDLVTFFEVGNSFPNFFNNPNPFVAKNGTTLASRNIPFDNMEVCSTNSGFYNTHNSICWLANNWFVYINKRSKSWFNIRXXIPFIN

SEQ ID NO: 1059 - protein, 135 aa, Streptococcus pneumoniae
MRIRNSPFDHILQTIFEFEDRTCQVTCRFEACSSICNDNWEFSQHIISVFQSPSCHTVCDKSDVFCSFLFDKNFASLWIYVVTITDQLCIGMWQLVHGSNHTQFTVSQPTHSIVSMHPNTRSSIDCFFGFIKSRV

SEQ ID NO: 1060 - protein, 98 aa, Streptococcus pneumoniae
MSKSNRHTFARNCTNKVFHPITFWCKGNFIKQAICRFLPRMKLLNTRVSHISWILCPLKSFCEIWTFIINPTNLSTCCFFIMVSKIFSDCKQLLISGC

SEQ ID NO: 1061 - protein, 95 aa, Streptococcus pneumoniae
MQCTFNVVVHHIYTCISMNMSIHKSWGNAITCIVNHLSPFRNLLYMFPKLAVHKFQVTTSTNSVWVEKLIRFNIVRHNVNLLKRLILQFIMSITL

SEQ ID NO: 1062 - protein, 41 aa, Streptococcus pneumoniae
MTLHQTFRFQNLEMPCQSSLINFQTLLNRHLVTRRMLQQKQ

SEQ ID NO: 1063 - protein, 40 aa, Streptococcus pneumoniae
LLSSFQDAVKFFAVVFFRKVQPSQEVAPNASSFTDQFMGG

SEQ ID NO: 1064 - protein, 54 aa, Streptococcus pneumoniae
MVVTTFNDFSIFKDNNLICIENGFQAVGNDETSSTCYNHLHGMLNLAFRHRIYV

SEQ ID NO: 1065 - protein, 69 aa, Streptococcus pneumoniae
MAEFNSVITTVTGIGDRLGAVILAEIRNIHAFDNPAQLQAFAGLDSSIYQSDQIDLAGRMVKRSSPHLR

SEQ ID NO: 1066 - protein, 835 aa, Streptococcus pneumoniae
MQQYVDIKKQYPDAFLLFRMGDFYELFYEDAVNAAQILEISLTSRNKNADNPIPMAGVPYHSAQQYIDVLIEQGYKVAIAEQMEDPKQAVGVVKREVVQVITPGTVVDSSKPDSQNNFLVSIDREGNQFGLAYMDLVTGDFYVTGLLDFTLVCGEIRNLKAREVVLGYDLSEEEEQILSRQMNLVLSYEKESFEDLHLLDLRLATVEQTASSKLLQYVHRTQMRELNHLKPVIRYEIKDFLQMDYATKASLDLVENARSGKKQGSLFWLLDETKTAMGMRLLRSWIHRPLIDKERIVQRQEVVQVFLDHFFERSDLTDSLKGVYDIERLASRVSFGKTNPKDLLQLATTLSSVPRIRAILEGMEQPTLAYLIAQLDAIPELESLISAAIAPEAPHVITDGGIIRTGFDETLDKYRCVLREGTSWIAEIEAKERENSGISTLKIDYNKKDGYYFHVTNSQLGNVPAHFFRKATLKNSERFGTEELARIEGDMLEAREKSANLEYEIFMRIREEVGKYIQRLQALAQGIATVDVLQSLAVVAETQHLIRPEFGDDSQIDIRKGRHAVVEKVMGAQTYIPNTIQMAEDTSIQLVTGPNMSGKSTYMRQLAMTAVMAQLGSYVPAESAHLPIFDAIFTRIGAADDLVSGQSTFMVEMMEANNAISHATKNSLILFDELGRGTATYDGMALAQSIIEYIHEHIGAKTLFATHYHELTSLESSLQHLVNVHVATLEQDGQVTFLHKIEPGPADKSYGIHVAKIAGLPADLLARADKILTQLENQGTESPPPMRQTSAVTEQISLFDRAEEHPILAELAKLDVYNMTPMQVMNVLVELKQKL

SEQ ID NO: 1067 - protein, 141 aa, Streptococcus pneumoniae
LTNLSSVDSEELFQFYRERGNAENFIKERKAGFFGDKTDSSTMIKNEVRMMMGCLAYNLYLFLKQLAGDEVKALTIKRFRRLFLHIAGKYVSTARRHILKFSSLYAYSKQFQALFDTICQINLILPVPYRARGQGKTCLTE

SEQ ID NO: 1068 - protein, 67 aa, Streptococcus pneumoniae; identical to SEQ ID NO: 521

SEQ ID NO: 1069 - protein, 67 aa, Streptococcus pneumoniae
MKIKVQTRKLAAGCSKHCFEVVDRTDEVSSKHGFEVADRTDEVSSKHGFEVADRTDEVSNIYTVRRR

SEQ ID NO: 1070 - protein, 144 aa, Streptococcus pneumoniae
MDFFNYLLWMICHNHGLHTLLLSKDCVCHTARDKDGNHRIKSVFPTKGQTCYQHDSSIYQERNTTDILTRFLTNSQADDVRPTTGDIVSKSKTNPQTHNNTPKKGIDNGILCQGCHRDKLDKEGTHRYRDKGKDGELMANLIPS

SEQ ID NO: 1071 - protein, 181 aa, Streptococcus pneumoniae
MIKQIKAHLNKSIQSIIGQKVEFVKQDEQAFTRKRRLSLETMIRTILGMGGKSLSKELLDARLTVSNSALVQRRYQIKPEAFYALFKEFTAPIPLNTDFPIFAADGSDICIPRNPMDTETSIQTQTDVKSYNLIHINALYDLTTGVYRDVSIQDKHAQHERLALIQMMEASPFRESSCYHG

SEQ ID NO: 1072 - protein, 240 aa, Streptococcus pneumoniae
MAHFQEKGWLYIIRIRDGKQSMPSSFNLPNTECFDQKVSLKLSRKQTNQLKKLYRDFPNDYHFIPHNSIFDFLPETSRKQDPVTLYELPFRMVRLKVEEGKYETLVTNTDYSVQELKNLYASRWGIETSFRDLKYSIGLVNFHAKKKEGILQEIFARFTNFNFCRWVTSQVAIDSSHKKQRYKVCFSDAAYACRLFFNGSLSSHQLKNYLKKQLSIIRPNRKYSRKIKAQSVVDFICRVT

SEQ ID NO: 1073 - protein, 191 aa, Streptococcus pneumoniae
MCELDILHDSLYQFCPELHLKRLNSLTLACHALLDCKTLTLTELGRNLPTKARTKHNIKRIDRLLGNRHLHKERLAVYRWHASFICSGNTMPIVLVDWSDIREQKRLMVLRASVALHGRSVTLYEKAFPLSEQCSKKAHDQFLADLASILPSNTTPLIVSDAGFKVPWYKSVEKLGWYWVSRVREKVQYAP

SEQ ID NO: 1074 - protein, 44 aa, Streptococcus pneumoniae
LSIQVETLELRVIFKEIKEIVKQFHQLHTMAFKRQVPLTIPVTM

SEQ ID NO: 1075 - protein, 97 aa, Streptococcus pneumoniae
MGALGYYEGFVPYVSNQYKNQAEEEGKPLSDKYIFEKILGKTYAAFKKDQINERVEKLGKLKPITINYNGKSEVIDSKEKLQELMNKAVKDEVAQIS

SEQ ID NO: 1076 - protein, 88 aa, Streptococcus pneumoniae; identical to SEQ ID NO: 535

SEQ ID NO: 1077 - protein, 211 aa, Streptococcus pneumoniae; identical to SEQ ID NO: 537

SEQ ID NO: 1078 - protein, 80 aa, Streptococcus pneumoniae
MSMDNCIDIITSLILNQMHIPFARWQAFSLYNISINIHHYNIGFFDFKEINTRRGNCHQLFFTIENAEIPTCSFRQICFY

SEQ ID NO: 1079 - protein, 49 aa, Streptococcus pneumoniae; identical to SEQ ID NO: 546

SEQ ID NO: 1080 - protein, 54 aa, Streptococcus pneumoniae; identical to SEQ ID NO: 547

SEQ ID NO: 1081 - protein, 66 aa, Streptococcus pneumoniae
LQNSKTSLDERRLSRSIFPSQGNKFPTINTIIDMFKNRLLIIIEGQILYRNISHYLISPTKAVKNR

SEQ ID NO: 1082 - protein, 392 aa, Streptococcus pneumoniae
MSNSFVKLLVSQLFANLADIFFRVTIIANIYIISKSVIATSLVPILIGISSFVASLLVPLVTKRLALNRVLSLSQFGKTILLAILVGMFTVMQSVAPLVTYLFVVAISILDGFAAPVSYAIVPRYATDLGKANSALSMTGEAVQLIGWGLGGLLFATIGLLPTTFIILVLYIISSFLMLFLPNAEVEVLESETNLEILLKGWKLVARNPRLRLFVSANLLEIFSNTIWVSSIILVFVTELLNKTESYWGYSNTAYSIGIIISGLIAFRLSEKFLAAKWESILFPLVAMAIVTLTILYFPNAQMFLLFSALVGMLSQLKEVPESVFLQETVEENHLVNVYSVLEVISTLAFSVFVLLMSYITESFGISISFWLSAICLMIEAILIYIRRDYFK

SEQ ID NO: 1083 - protein, 282 aa, Streptococcus pneumoniae
MSKLLDKILSRENMLEAYNQVKSNKGSAGIDGMTIEEMDNYLRQNWRLTKELIKQRKYKPQPVLKVEIPKPDGGIRQLGIPTVMDRMIQQAIVQVMSPICEPHFSDTSYDFRPNRSCEKAIMKLLEYLNDGYEWIVDIDLEKFFDTVPQDRLMSLVHNIIEDGDTESLIRKYLHSGVIINGQRYKTLVGTPQGGNLSPLLSNIMLNELDKELEKRGLRFVRYADDCVITVGSEAASKRVMYSVSRFIEKRLGLKVNMTKRVEISRFWVLEIIRWLEKPSTSR

SEQ ID NO: 1084 - protein, 85 aa, Streptococcus pneumoniae; identical to SEQ ID NO: 552

SEQ ID NO: 1085 - protein, 39 aa, Streptococcus pneumoniae; identical to SEQ ID NO: 553

SEQ ID NO: 1086 - protein, 119 aa, Streptococcus pneumoniae
LRSLIRQITYFITPRTCCINNQTGLDFKHLVCQEITSYNTCNLATFVKEEAFCLHVVGNEGTVLVGTFDVFNHETRIVVTEVKIHSTSYQAFLLQVWLAFQDLILAQNLVRSWCVAHTC

SEQ ID NO: 1087 - protein, 40 aa, Streptococcus pneumoniae; identical to SEQ ID NO: 555

SEQ ID NO: 1088 - protein, 55 aa, Streptococcus pneumoniae
LKIDHTQLSPSNLLNTFVTPFIFYLKHSINLTNAEIICFSFYFHADFLVHYPENQ

SEQ ID NO: 1089 - protein, 863 aa, Streptococcus pneumoniae
LKKVQHTQNVDFNKKLSRIKTKYLYGLKEKSEAELTLKTKETKEELTAAFEQFKKDTLKSGKKVAEAEKKAKAQKEEDRRNYPTNTYKTIELEIAEAEVGVAKAELELEFAQAQVQIPQDTEKINAAKSKVEAAKSNVKKLEKIKSDIEKTYLYKLDNSTKETPKSRVRRNSPQVGDSRELKETIDKAKETLSTYMVTRLTKLDPSVFWFADLLMDAKKVVEEYKTKLEDASDKKSVEDLRKEAEGKIESLIVTHQNREKENQPAPQPGGQAGGSMVVPPVTQTPPSTSQSPGQKATEAEKKKLQDLIRQFQEALNKLDDETKTVPDGAKLTGEAGKAYNETRTYAKEVVDKSKKLLSQTAVTMDELAMQLTKLNDAMSKLKEAKAKLVPEVKPQPENPEPKPQPEGEKPSVPDINQEKEKAKLAIATYMSKILDDIKKHHLKKEKHHQIVALIKDLDKLKKQALSEIDNVNTKVEIENTVHKVFADMDTVVTKFQKGLIQNTPQVPEAPKSPEVPKVSDTPKAPDTPQVPEAPKSPEVPKVPEAPKAPDTPQVPEAPKSPEVPKVPDTPKAPDTPQVPEAPKSPEVPKVPDTPKAPDTPQVPEAPKAPDTPQIPEAPAPETPKTGWKQENGMWYFYNTDGSMATGWLEYNGSWYYLNANGAMATGWLEYNGSWYYLNTNGAMETGWLEYNGSWYYLNTNGAMETGWLEYNGSWYYLNTNGAMETGWLEYNGSWYYLNTNGAMETGWLEYNGSWYYLNTNGAMETGWLEYNGSWYYLNTNGAMETGWLEYNGSWYYLNANGSMATGWLKDGDTWYYLEASGAMKESQWFKVSDKWYYVNGSGALAVNTTVGGYRVNANGKWVN

SEQ ID NO: 1090 - protein, 42 aa, Streptococcus pneumoniae; identical to SEQ ID NO: 558

SEQ ID NO: 1091 - protein, 44 aa, Streptococcus pneumoniae; identical to SEQ ID NO: 559

SEQ ID NO: 1092 - protein, 43 aa, Streptococcus pneumoniae
MVKTTNRLEAIGFSFILFENLFKPRQLYLQPQTSVLSNLRLAA

SEQ ID NO: 1093 - protein, 60 aa, Streptococcus pneumoniae; identical to SEQ ID NO: 561

SEQ ID NO: 1094 - protein, 84 aa, Streptococcus pneumoniae
MRTFFLYSSAFKKHSSPSPINDGLYHLLLQSLYNILELIHDIFQSLKGFILKSTFTNLFPHLFNGVHLWCVWRNKCKANISRNL

SEQ ID NO: 1095 - protein, 47 aa, Streptococcus pneumoniae; identical to SEQ ID NO: 563

SEQ ID NO: 1096 - protein, 37 aa, Streptococcus pneumoniae
LIVWILKNHTDLTTYIPNIFLSQTLAINYNLSRFCFQ

SEQ ID NO: 1097 - protein, 38 aa, Streptococcus pneumoniae
MPYNRKPFSTFHVKRNILHIVVVLIFFITKRKIFYINY

SEQ ID NO: 1098 - protein, 81 aa, Streptococcus pneumoniae
MFKKMSNSSRILFYISVNFCDKRIYRTKLYSDTPVNLFKFLFRQKSNCQSIGQTSSINLFFYSWIVFFFKNNLCHSIPSIK

SEQ ID NO: 1099 - protein, 112 aa, Streptococcus pneumoniae; identical to SEQ ID NO: 567

SEQ ID NO: 1100 - protein, 41 aa, Streptococcus pneumoniae; identical to SEQ ID NO: 568

SEQ ID NO: 1101 - protein, 37 aa, Streptococcus pneumoniae; identical to SEQ ID NO: 452

SEQ ID NO: 1102 - protein, 46 aa, Streptococcus pneumoniae
MKIKEQTRKLAAGCSKHCFEVVDETDEVSNHTYGKVKLTWFEEIFE

SEQ ID NO: 1103 - protein, 86 aa, Streptococcus pneumoniae; identical to SEQ ID NO: 572

SEQ ID NO: 1104 - protein, 39 aa, Streptococcus pneumoniae
MVNVNQVSIEVKNTFKNWNFTSSIELTTFSKFSQSPTMT

SEQ ID NO: 1105 - protein, 37 aa, Streptococcus pneumoniae; identical to SEQ ID NO: 574

SEQ ID NO: 1106 - protein, 42 aa, Streptococcus pneumoniae
  misc_feature 38...39: Xaa is any amino acid
LKSVGSRVEDKRYQETIVATFSDILKRSREMQDQNIKXXFIH

SEQ ID NO: 1107 - protein, 39 aa, Streptococcus pneumoniae
  misc_feature 34...35: Xaa is any amino acid
MLTIEPTKAPLVNVCDTANTARIDDEPYSPGDFXXHSIH

SEQ ID NO: 1108 - protein, 144 aa, Streptococcus pneumoniae
MRWNIGCHPNRDTSCSINQKVWKTRWQDQGFPFIGIIVINEINCIFVDITKHFQSNLAHTCLGITLSGSTISIHGTKIPMTIYKHVTVAPPLSHTDHGFINRGIPVWVIFTHDIPCNTSRFFMGFVWGHTQFIHSVKNATVNRF

SEQ ID NO: 1109 - protein, 56 aa, Streptococcus pneumoniae
MTDFNTFLQLSEGWSLFRSDFLLCIKHFLNSFSSSKGQLKASPTRCNLDNRLVVLL

SEQ ID NO: 1110 - protein, 195 aa, Streptococcus pneumoniae
MGGNPPMKKYSIVDKIVLSTKIKRIIIFTVFRENWEPYMKKYTEVFQSQFPNLNIDYLLLDTEQIDLDSYLDADIIIIGGGNTEKYIATYVNQEFKNYIDHMLNKGAKVIGFSAGALLLGEKVYVSPNDNSDHQIKIKDGLGLFSQFLISVYYDSWNDKANKDRAEELVNVPIIPLNDHSCLVLDKLGNIIEKID

SEQ ID NO: 1111 - protein, 92 aa, Streptococcus pneumoniae
MYGGEAKSNAMEAIQAAKKGDFSKANRRLADANAALLQAHKAQTEMLTREAQGEKTSISLLMVHAQDHLMTSLTFVDLAKEVVEVYERFEKN

SEQ ID NO: 1112 - protein, 38 aa, Streptococcus pneumoniae; identical to SEQ ID NO: 378

SEQ ID NO: 1113 - protein, 89 aa, Streptococcus pneumoniae
VTAHRIFGTSSIHSKLIGLAMLGITAMKIICHKLNRNHINIFRRLGIQGKTEFLLIHLIRQVKMNHLSQGMNPTICPTSTVNSNGLPFI

SEQ ID NO: 1114 - protein, 40 aa, Streptococcus pneumoniae
MLKNGIISWKDFKSFFCQGCQTSHCYKPMQAVQGIGSQIS

SEQ ID NO: 1115 - protein, 49 aa, Streptococcus pneumoniae
MRFLADQDRIQHHRYSWALFDKVQGLLSHADSREKTNLNSPKFHITQAI

SEQ ID NO: 1116 - protein, 360 aa, Streptococcus pneumoniae
MSYGRPYILNVDGAIHDGWLAISNYENSLNKDYLFYILSSNVVYSQFLSLISGAVVKNLNSDKVASILIPLPPLAEQQRIIEAIESALEKVDEYAESYNRLEQLDKEFPDKLKKSILQYAMQGKLVEQDPNDESVEVLLEKIRAEKQKLFEEGKIKKKDLDISIVSQGDDNSYYEEVPCEIPESWEWVRLNDITSYIQRGKSPKYSNIPIYPVIAQKCNQWSGFSIDLARFIDPETVHSYQKERLLRDGDLMWNSTGLGTLGRLAIYHENKNPYVWAVADSHVTVIRVLSGVINCHFIYNFLSSPIVQSVIEEKASGSTKQKELLTKTIKEYLIPLPPLPEQSRIVDRIEQFFAHIDALI

SEQ ID NO: 1117 - protein, 62 aa, Streptococcus pneumoniae; identical to SEQ ID NO: 157

SEQ ID NO: 1118 - protein, 38 aa, Streptococcus pneumoniae
MGFKVSHFKIPSSHLSINVLRTVENFTEIGQGLLHISP

SEQ ID NO: 1119 - protein, 124 aa, Streptococcus pneumoniae
VGFFDFGLTNSCRQVRQFTQTVQDFLVCCHQGIVKEGQGYAGICFKFHPSLGNIGKFVIAIVRRLRHKSIVANMAHLNVDLFQFRKGLLEILKSVKIALVITAKLVDVFASFLDCTQEILTVLV

SEQ ID NO: 1120 - protein, 339 aa, Streptococcus pneumoniae
MNITYIVGNGLDLQYGLKTRYRDFYEFQNKVYISRTENEEKYSNFIYESLFSDKVNDYENWSDFELSIGKLTKDNDLISSSIEIKEKFIDDFSEVVDDLREYLRIQQEKNLEKGNAIDFISTLDDMRTSLPVINQPAIDKKYNENPHQDDIVNIVTLNYTHVIDKLYNGSAKSFRNQLRANLYNFYIEPPIHAHGTVDVCTVLGVSDEIQISNSFDEEQKESLIKNLVLKNYRENMDVKNSDIIKNSDIIILYGVSLGETDGYIWNQIAEQSIRSSVPVIIYHYVPHFDAGNPTRVKRLYRNVEDKFIQNSGIDLELEKKLRDNLIVVIGKTIFNLMER

SEQ ID NO: 1121 - protein, 654 aa, Streptococcus pneumoniae
VGAKFNDEKTKHIVTHYISRDALNKTITVLSKIIEVFEEHFDRAITCEMFSDSSTFASINFSEYGISKSKFQQYLRDSCFIENFGVEHTTVSDIQNSIVTFYDVHTDIFRLLNKLNIDISEANIMNQTTVLLDEKNIELLLSKAPYLVSMIVEDFSKLSVDDFSLDNNDLKINLPSPMNEPVVGVIDTLFDKRVYFNEWVEYHDFVSPDISKDSQDYKHGTAVTSLIVDGANLNPNLDDGCGNFRVRHFGVSLQSGFNSFTIIKQIKEIVSQNADIKVWNLSLGSNDEIRENFISAEGALLDEIQFENDVIFIIAGTNASVINGKRKRIGAPADSLNSIIVNSVDFNNQSVSYSREGIVLSFFVKPDVSYYGGGNGDFINVCEPLGLGRVAGTSFAAPFIARKMAYLIHIMGLSREEAKALLIDAAIPWNDKKTFTDLSLIGNGIVPIKMDDILSTPDDEIKFIVSDISRAYDTYNYDFPVPISSESYPYVAKATMCYFPNCSRKQGVDYTNTEMQLTFGRLKSDGIKSINKDNQHAEDTPGYVRENAARNIFRKWDNVKHIGESFTSRKRAKAILNPSNPQWGMSIKTIERLKSGDGQGVRFGVVVTLKELNGVNRIEDFIQQAELRGWLVNRLQVEAQVDLFNSLNEEIEFE

SEQ ID NO: 1122 - protein, 73 aa, Streptococcus pneumoniae; identical to SEQ ID NO: 672

SEQ ID NO: 1123 - protein, 202 aa, Streptococcus pneumoniae
MTVQKRARFKNVFLVFFCVFVALFSWQRVVEASDYDHYNPIEKDASSTGFETLQHLNKDVCGWISLDGTKVDYPLLQSQDNVKYLDRNAFGDYTIMGSIFLDYRFNPNFTDFNTIIYGHSMASGAMFGEIKKFADKEFFDQHRYGSIYYNGRERGLEIFGILEVDAYDTEIYRTLSSKDEEHQAYYQYLLSKAKYKRDVSLT

SEQ ID NO: 1124 - protein, 37 aa, Streptococcus pneumoniae; identical to SEQ ID NO: 674

SEQ ID NO: 1125 - protein, 172 aa, Streptococcus pneumoniae; identical to SEQ ID NO: 675

SEQ ID NO: 1126 - protein, 167 aa, Streptococcus pneumoniae
LDPWDGNSQKPRFQGLWKFIQRDSRKWRERRFYGPTFGKHLTNKKVFDKVFELFTRPGNIIIIFINFCGFTSEIRNRGKFFGLIEDNLKQVHPIFQTVFKTFLKDKEKIINALQLHYSNAKPEATNNLIKLIKRNAFGFRNFENFKKRIFIALNIKKERTKFVLSRA

SEQ ID NO: 1127 - protein, 86 aa, Streptococcus pneumoniae
MVLYFWKVFQRVPNKLWKNMGENFQVRSLQDKIIQNLTNKGFSYFDAKMPIDEWDSQVDEETTQELISRDLISNILSMPESMKDTN

SEQ ID NO: 1128 - protein, 69 aa, Streptococcus pneumoniae
MSKSHSFSISLGISNSFWNNIHTSECWYFLAEGKSNRSNSTISVNQMVFFINIQRFYCFAIEDFCLLRI

SEQ ID NO: 1129 - protein, 44 aa, Streptococcus pneumoniae; identical to SEQ ID NO: 471

SEQ ID NO: 1130 - protein, 179 aa, Streptococcus pneumoniae
MKLLSIAISSYNAAAYLHYCVESLVIGGEQVGILIINDGSQDQTQEIAECLASKYPNIVRAIYQENKCHGGAVNRGLAEASGRYFKVVDSDDWVDPRAYLKILETLQELESKGQEVDVFVTNFVYEKEGQSRKKSMSYDSVLPVRQIFGWDQVGNFSKGQYTMMHSLIYRTDLLRASQF

SEQ ID NO: 1131 - protein, 136 aa, Streptococcus pneumoniae
MYYLPVDFYRYLIGREDQSVNEQVMIKCIDQQLKVNRLLIDQLDLSQVSHPKMREYLLNHIEITTVISSTLLNRSGTAEHLAKKRQLWTYIQQKNPEVFQAIRKTMLSRLTKHSVLPDRKLSNVVYQITKSVYGFN

SEQ ID NO: 1132 - protein, 253 aa, Streptococcus pneumoniae
MKRIQLNMNETKKYLVIKAIAQGKKTKKRACVELNLSERQINRLLLAYQQKGKEAFRHGHGNRNRKPKHAIPDEIKERVLKKYLSYETYKPNVLHFCELLAEEEGIKLSDTTVRKILYKKNILSPKSHRKTKKRVRKQAKLNLNQPLDNPILPTAKDFLEDPKKVHPSRPRKKFAGELIQMDASPHAWFGPETTNLHLAIDDASGNILGAYFDKQETLNAYYHVLEQILANHGIPLQMKTDKRTVFTYQALQL

SEQ ID NO: 1133 - protein, 85 aa, Streptococcus pneumoniae
LPVTFDFLIEGSTKGNIDKLDTATDCHNWFILTKRFLQECQFKFVTDQIVIIAFDGLFLSIKLRMNILASCQNEFVNHFHIITYN

SEQ ID NO: 1134 - protein, 102 aa, Streptococcus pneumoniae
MSLITHKRFISCNENIKHYKRLIDKAKKCVNDLMAEFNSVITTVTGIENRLGAVILAEIRNIHAFDNPAQLQAFAGLDSSIYQSGQIDLAGRMVKRGSPHLR

SEQ ID NO: 1135 - protein, 835 aa, Streptococcus pneumoniae; identical to SEQ ID NO: 1066

SEQ ID NO: 1136 - protein, 44 aa, Streptococcus pneumoniae
MRRKYKSIALKKELANDSGKKKFHAMKAQAIVTSQGRIVSIAMI

SEQ ID NO: 1137 - protein, 138 aa, Streptococcus pneumoniae
LTNLSSVDSEELFQFYRERGNAENFIKERKAGFFGDKTDSSTMIKNEVRMMMGCLAYNLYLFLKQLAGDEVKALTIKRFRRLFLHIAGKYVSTARRHILKFSSLYAYSKQFQALFDTICQINLILPVPYRARGQGKTA

SEQ ID NO: 1138 - protein, 67 aa, Streptococcus pneumoniae; identical to SEQ ID NO: 521

SEQ ID NO: 1139 - protein, 42 aa, Streptococcus pneumoniae; identical to SEQ ID NO: 522

SEQ ID NO: 1140 - protein, 164 aa, Streptococcus pneumoniae
VDRTDEVSSKHGFEVVDETDEVSSKHGFEVADRTDEVSSKHGFEVADRTDEVSSKHGFEVADRTDEVSSKHGFEVADRTDEVSSKHGFEVADRTDEVSSKHGFEVADRTDEVSSKHGFEVADRTDEVSSKHGFEVADRTDEVSSKHGFEVADRTDEVSNIYTAR

SEQ ID NO: 1141 - protein, 144 aa, Streptococcus pneumoniae; identical to SEQ ID NO: 523

SEQ ID NO: 1142 - protein, 78 aa, Streptococcus pneumoniae
MKIKEQTRKLAAGCSKHCFEVVDETDKVSSKHGFEVVDETDEVSSKHGFEVVDETDEVSNHTYGKATLTWFEEIFEEY

SEQ ID NO: 1143 - protein, 50 aa, Streptococcus pneumoniae
LQNDKNHKLFDNYTCQKEKDVLRCKQVKRKEERSYDVGTRIYTIYDFLLF

SEQ ID NO: 1144 - protein, 63 aa, Streptococcus pneumoniae
MKIKEQTRKLAAGCSKHCFEVMDRTDEVSSKHGFEVVDETDEVSNHTYGEVKLTWFEEIFEEY

SEQ ID NO: 1145 - protein, 306 aa, Streptococcus pneumoniae
LFFKDEKQALYTKPKTKSSSFRASKVSNQTIVATTRTDCQVIALNLCDKLENGVVVVVQTTHHIGIDDVIYSKIFQHLTHSIKMSLAFFIKKVQDRRRILYCHLVFFFLRVQDTKRIFLQATLAILRQGLLERCQIVNQGLAVGCTALRISKSVEVQFDTLNTDFLQKMGCHSDCFHIGSWIARAKTLNTNLVELAQAPCLWTLITEHRSHVVELAWLLHFWGEEFIFHIGTDNGRSSFWTEGNMAVTLVIEIVHFLGYDIGRISDRAADNLVMLKNGRAHFCVVVALENFTGKALNVLPFGRFSR

SEQ ID NO: 1146 - protein, 283 aa, Streptococcus pneumoniae
MEQIGKVFRQLRESRNISLRQATGGQFSPSMLSRFETGQSELSVEKFLFALENISASVEEILFLARGFQYDTDSELRKEITDVLEPKNVAPLEDLYRREYQKHAHSHNKQKHILNAIMIKSYMKSMDERVELTAEEGKVLHDYLFSTEIWGIYELNLFSVSSPFLSVSLFTRYVREMVRKSDFLMEMSGNRNLFYTILLNGFLASIECEEFTNAYYFKRVIEEHFYKENETYFRIVYLWAEGLLDSKQGRVKEGQKKMEDAVRIFEMLGCNKSAEYYRNTTEC

SEQ ID NO: 1147 - protein, 317 aa, Streptococcus pneumoniae
MQEHYTPKGKHLTIDNRRLIERWKNENKSNREIAGLLGKAPQTIHTEVKRGTTLQQVRKGLYKKVYSADYAQTVYQFNRKRSVKKLILTKEIREKILHYHKQKFSPEMMVNKKQVKVGISTIYYWFHNGHLGLTKADMLYPRKRKGVKKQASPNFKPAGKSIEERPDVINLRLENGHYEIDTVLLTKIKNYCLLVLTDRRSRHQIIRLIPNKTAESVNQALTLLLGEHHILSITADNGSEFKRLSEVFPEEHIYYAHAYSSWERGSNENHNRLIRRWLPKGTKKTTPKEVAFIENWINNYPKKCLDYKSPSEFLLGG

SEQ ID NO: 1148 - protein, 39 aa, Streptococcus pneumoniae
MKIKGQTRKLAAGCSKHCFEVVDRTDEVSNHTYGKATLT

SEQ ID NO: 1149 - protein, 78 aa, Streptococcus pneumoniae; identical to SEQ ID NO: 530

SEQ ID NO: 1150 - protein, 60 aa, Streptococcus pneumoniae
MDLKFEGVDLEYKKAKNNLPESFWETYSAFANTNGGKIILGIDEKNIDTYQRVNRLPAKL

SEQ ID NO: 1151 - protein, 44 aa, Streptococcus pneumoniae
LSIQVETLELRVIFKEIKEIVKQFHQLHTMAFKRQVPLTVPVTM

SEQ ID NO: 1152 - protein, 42 aa, Streptococcus pneumoniae; identical to SEQ ID NO: 533

SEQ ID NO: 1153 - protein, 96 aa, Streptococcus pneumoniae
MGALGYYEGFVPYVSNQYKNQAEEEGKPLSDKYIFEKILGKTYAAFKKDQINERVEKLGKLKPITINYNGKSEVIDSKEKLQELMNKAVKDEVAQI

SEQ ID NO: 1154 - protein, 88 aa, Streptococcus pneumoniae
MMGDGMKEFQFERKQRFSLRKYAIGACSVLLGTSLFFAGMGDQPVQDTETSSALISSHYLDEQDLSEKLKSELQWFELENKLLNLWEH

SEQ ID NO: 1155 - protein, 120 aa, Streptococcus pneumoniae
VNIAKTSIIKAHTTKEDGIDHTFTRFNIMSIFYSTRKIFLDKLNSTNRQFLGYIISTRCYQSFNSVSQSIHTSSSSQAFRFGKHEFRVINRDKSKAILVNHYHLNLAFFISNHIVNGNFC

SEQ ID NO: 1156 - protein, 72 aa, Streptococcus pneumoniae
MKPFIILWSSTICSHDRNTTSCILWRTPAKTDDKVTAMFLQSSYPICDIFTSRVWLYIAKDDIFDSFCIQWF

SEQ ID NO: 1157 - protein, 63 aa, Streptococcus pneumoniae
MHIPFARWQAFSLYNISINIHHYNIGFFDFKEINTRRGNCHQLFFTIENTEIPTCSFRQICFY

SEQ ID NO: 1158 - protein, 49 aa, Streptococcus pneumoniae; identical to SEQ ID NO: 546

SEQ ID NO: 1159 - protein, 54 aa, Streptococcus pneumoniae; identical to SEQ ID NO: 547

SEQ ID NO: 1160 - protein, 66 aa, Streptococcus pneumoniae; identical to SEQ ID NO: 1081

SEQ ID NO: 1161 - protein, 392 aa, Streptococcus pneumoniae; identical to SEQ ID NO: 1082

SEQ ID NO: 1162 - protein, 183 aa, Streptococcus pneumoniae
MSLVHNIIEDGDTESLIRKYLHSGVIINGQRYKTLVGTPQGGNLSPLLSNIMLNELDKELEKRGLRFVRYADDCVITVGSEAASKRVMYSVSRFIEKRLGLKVNMTKTKITRPRELKYLGFGFWKSSDGWKSRPHQDSVRRFKLKLKKLTHRKWSIDLTRRIEQLNLSIRGWISYFSLGNMKV

SEQ ID NO: 1163 - protein, 137 aa, Streptococcus pneumoniae
MSKLLDKILSRENMLEAYNQVKSNKGSAGIDGMTIEEMDNYLRQNWRLTKELIKQRKYKPQPVLKVEIPKPDGGIRQLGIPTVMDRMIQQAIVQVMSPICEPHFSDTSYGFRPNRSCEKAIMKLLEYLNDGYEWIVD

SEQ ID NO: 1164 - protein, 40 aa, Streptococcus pneumoniae; identical to SEQ ID NO: 555

SEQ ID NO: 1165 - protein, 47 aa, Streptococcus pneumoniae
MFCLTFICLIRRSGYLGSYLLLCRMNHTSHKKTGNSYTSYSNTKFTN

SEQ ID NO: 1166 - protein, 761 aa, Streptococcus pneumoniae
LPSEIKAKLDAAFEQFKKDTLPTEPGKKVAEAEKKVEEAKKKAEDQKEKDLRNYPTNTYKTLELDIAESDVEVKKAELELVKEEAKESRDEKKINQAKAKVENKKAEATRLKNIKTDREKAEEAKRRADAKLQEANVATSEQDKSKRRAKREVLGELATPDKKENDAKSSDSSVGEETLTSPSLKPEKKVAEAEKKVEEAKKKAEDQKEEDRRNYPTNTYKTLELEIAESDVEVKKAELELVKEEAKESRDEKKINQAKAKVENKKAEATRLKNIKTDREKAEEAKRRADAKLQEANVATSEQDKSKRRAKREVLGELATPDKKENDAKSSDSSVGEETLTSPSLKPEKKVAEAEKKVEEAKKKAEDQKEEDRRNYPTNTYKTLELEIAESDVEVKKAELELVKEEAKESRNEEKIKQVKAKVESKKAEATRLENIKTDRKKAEEEEAKRRAAEEDKVKEKPAEQPQPAPAPQPEKPTEEPENPAPAPAPKPENPAEKPKAEKPADQQAEEDYARRSEEEYNRLTQQQPPKAEKPAQPSTPKTGWKQENGMWYFYNTDGSMATGWLQNNGSWYYLNSNGAMATGWLQNNGSWYYLNANGSMATGWLQNNGSWYYLNANGSMATGWLQYNGSWYYLNANGDMATGWLQNNGSWYYLNANGDMATGWLQNNGSWYYLNANGDMATGWLQYNGSWYYLNANGDMETGWVKDGDTWYYLEASGAMKASQWFKVSDKWYYVNGSGALAVNTTVDGYGVNANGEWVN

SEQ ID NO: 1167 - protein, 42 aa, Streptococcus pneumoniae; identical to SEQ ID NO: 558

SEQ ID NO: 1168 - protein, 60 aa, Streptococcus pneumoniae; identical to SEQ ID NO: 561

SEQ ID NO: 1169 - protein, 47 aa, Streptococcus pneumoniae; identical to SEQ ID NO: 563

SEQ ID NO: 1170 - protein, 37 aa, Streptococcus pneumoniae; identical to SEQ ID NO: 564

SEQ ID NO: 1171 - protein, 38 aa, Streptococcus pneumoniae; identical to SEQ ID NO: 565

SEQ ID NO: 1172 - protein, 81 aa, Streptococcus pneumoniae
MFKKMSNSSRILFYISVNFCDKRIYRTKLYSDTPVNLFKFLFRQKSNCQSVGQTSSINLFFYSWIVFFFKNNLCHSIPSIK

SEQ ID NO: 1173 - protein, 91 aa, Streptococcus pneumoniae
LADGSRKLAEGGTKLTSGLEDLQTGLASLGQGLGNASDQLKSVSTESKNAEILSNPLNLSKTDNDQVPVNGIAIAPYMISVALFLQQYQQI

SEQ ID NO: 1174 - protein, 49 aa, Streptococcus pneumoniae
MEMSFIAQDFDKLNIITVLESRTQAIIRNPMNTRLSSATGSSFNKIVRN

SEQ ID NO: 1175 - protein, 68 aa, Streptococcus pneumoniae
MELAETSIVKKNHQIPCIINQKIAQKLIEKTSMTDIDHQLSISTSTVIRKINNFHFEHDFSRLPEIMS

SEQ ID NO: 1176 - protein, 232 aa, Streptococcus pneumoniae
MNYIDTNEMLFVETPRKVITSDELRKKNTKYLDQKEFKLFIQNLKDEALCDYRITKYIRIAKVLFLTGMRYGELAALNYKEDIDFSKKTIHIKHTYDFRQKERTTPKTIKSDRVITAPQKVLDIIKEQIIENATNGFDTDFIFINTLGEPITNARVICALKRHGQKIGIEKNITTHTFRHSHISLLAELGIPLTAIMDRVGHSDSKTTLEIYSHVTQKMVSDISSKLDKIKF

SEQ ID NO: 1177 - protein, 117 aa, Streptococcus pneumoniae
MWMEELPNGKYKFFERYKDPYTEKLKKVSVTMEKKTPQARNQAAILLQEKIKQKLGEKQHSVSNITFEKLYEEFEENWKHGVKNSTVYASKNVKKEILKQIEGDYLVRNLIDVYYKK

SEQ ID NO: 1178 - protein, 356 aa, Streptococcus pneumoniae
MEIDKVKADLKQVGKRVADLSQSITNEEQTKNAFIMPFFQALGYDIFNPLEFVPEFTADVGIKKGEKVDYAIILDGEPQILIECKSITENLTKHDSQLFRYFVTTKSKFGILTNGREYKFFTDLDEPNKMDTTPFLTIDVTDIKENQFTEIIKFHKENFDIDNIVSSASELKYLNNLKAFLTENITTPSDSFLRYLTSEIYEGRVTQNILTTFSPIIVKGFNQFITERVNEKLSAALNTSVETKVTTDIPKVEAEAEEIVEVTDEIITTPAELEVYTVVKMLARDVVSPERVFYRDNRSYFNVLVDDNIKKWVLRYRSNSKKSTIEIRDKGIFPVSTPLEVANYANEILEVIKKFS

SEQ ID NO: 1179 - protein, 126 aa, Streptococcus pneumoniae
MTLAKLCEEYQVELCLFDGSNWHNSGFYNPDTNVLAIDHNLTPEQQIQVALHELGHKDHTRSEHQNARLRCENEADRNMIHHLVKDALENLDDPTEFDYLKFMSYYNLKTMTNEIMVKEEYLALVN

SEQ ID NO: 1180 - protein, 87 aa, Streptococcus pneumoniae
MYRLDIDKKALKQLKKLDTPTRKQILSWLAKNIENTTNPRQHGKALKANLAGYWRYRVENYRIICDIQDDKLVVLAVEIAHRRDVYK

SEQ ID NO: 1181 - protein, 77 aa, Streptococcus pneumoniae
MTITINFTEKNSYITDYLNKHGIDTTTMDFDDFMALMEDIEDARAADQAYMEYLADPATYTMDEVLDELGLTREDIA

SEQ ID NO: 1182 - protein, 122 aa, Streptococcus pneumoniae
MFETFEKIKELAKKRGKALGQVEEDLGYGRNTLYKIKNSTPNAERIAEIANYFNVSTDYLLGRTDNPAIAGSDEFAQVNGQIIDLRKAAANTMLFDGKPLNEDDIDFITSVLSAHFKSKGER

SEQ ID NO: 1183 - protein, 43 aa, Streptococcus pneumoniae
MVSILKNLEQEKDHLEKVIKVVSAGGKFLRLPYQKSHARLVRI

SEQ ID NO: 1184 - protein, 63 aa, Streptococcus pneumoniae
MPDIANGRERVIAFLKEKGIKKATLAVAYGFKRQEVTNILSGTTKGPRANSFILQVIEDYGIE

SEQ ID NO: 1185 - protein, 67 aa, Streptococcus pneumoniae
MRPKRYPYSGQKESTFVKADPELVEKLLRNTSFLECLQKKPINFQIDSEEFKRLSYEAIHDTSQVTQ

SEQ ID NO: 1186 - protein, 49 aa, Streptococcus pneumoniae
LKNREEEWQGIIAKNAILLIIAPFYFLIIVKNGVLSKIKTVTEITAYQL

SEQ ID NO: 1187 - protein, 59 aa, Streptococcus pneumoniae
MREVIQELLDSSMSTSAISQGAGVPWTTVSDLRKGKTSMDKMALLTAEKLYEFATTDKQ

SEQ ID NO: 1188 - protein, 420 aa, Streptococcus pneumoniae
VEEVEVAEVKNARVSLTGEKTKPMKLAEVTSINVNRTKTEMEEFNRVLGGGVVPGSLVLIGGDPGIGKSTLLLQVSTQLSQVGTVLYVSGEESAQQIKLRAERLGDIDSEFYLYAETNMQSVRAEVERIQPDFLIIDSIQTIMSPEISGVQGSVSQVREVTAELMQLAKTNNIAIFIVGHVTKEGTLAGPRMLEHMVDTVLYFEGERHHTFRILRAVKNRFGSTNEIGIFEMQSGGLVEVLNPSQVFLEERLDGATGSSIVVTMEGTRPILAEVQALVTPTMFGNAKRTTTGLDFNRASLIMAVLEKRAGLLLQNQDAYLKSAGGVKLDEPAIDLAVAVAIASSYKDKPTNPQECFVGELGLTGEIRRVNRIEQRINEAAKLGFTKIYVPQNSLTGITLPKEIQVIGVTTIQEVLKKVFA

SEQ ID NO: 1189 - protein, 60 aa, Streptococcus pneumoniae; identical to SEQ ID NO: 606

SEQ ID NO: 1190 - protein, 65 aa, Streptococcus pneumoniae; identical to SEQ ID NO: 607

SEQ ID NO: 1191 - protein, 55 aa, Streptococcus pneumoniae
MSRYSYSLDSRKIVFEISCFKEKKASLTLFFHLFESSIMKLATQPSFSSFYSELK

SEQ ID NO: 1192 - protein, 71 aa, Streptococcus pneumoniae
MKIKEQTRKLAAGCSKHCFEVVDRTDEVSSKHRFEVADRTDEVSSKHRFEVADRTDEVSNIYLRQGDVDVV

SEQ ID NO: 1193 - protein, 37 aa, Streptococcus pneumoniae; identical to SEQ ID NO: 82

SEQ ID NO: 1194 - protein, 41 aa, Streptococcus pneumoniae; identical to SEQ ID NO: 83

SEQ ID NO: 1195 - protein, 795 aa, Streptococcus pneumoniae
MFEKIKGINIKSGIFEDETKLELFEGNFEGTNPVQNDRASLLFGRNGSGKSTIARGINQLKNGEIGTDRVSFIDKNNNNIVLSDTERKSIFVFNEHYVDQKVKIAQEGLDTIVILGEQVDIDEELDRLRTQLSESQIESQDYYAEYEEYLDEKNEKSPDFWKKEMTDSLKGVGNWAERDREIKGNRAASPVHNNTFQNFVDLQPILDKNELEVEFNNKKARYFSIRDSAVTINNELSLPDINFDSNELSTLLSEKIEEPELNSRDKYLLTLLSDSTKGERHLREVKDFFEDEHQKKCPFCTQSVSEDVKVELTNGITKLLSRAVEEHQSALRGKKIDEINQDFSGYEQIDPILIQSYQNSINALNAKFNEINSIIDKKIDNPYNIVELPNISFSQELSQAEHDIEKINQAIIKHNSEISGIQKLKVDLLQINNELAFYEIQDAYKKFQEKTNKKAICENNYNNSSKRVKDYEKQISDLEDKKLNIDIAVDEINKSLNYIFFSKNRLAIQNQNGKYYLLSRGKSVVPSRVSVGERNALALCYFFTEIIQQRELADAYSHEYFIVIDDPISSFDMENKVGITSYLKYCLTRFFKGNSNTRVLLMTHDKQTIYDFDIFLKEIMESCKEEEGGQKSKYKKLELVSGKLQEFKTSTHDYTELLEIVFGYALGNSTPTSESFVGNAMRKILEAYGSFNYKKGIAELTTDPLIVEKIDKEYRTYFENLMYRLVLNGESHFKDPVKTLSIDFFDTISDEERKKTARDLLVLLYLLDDLHVLKHLEGVSNAENRLEQWKCEILE

SEQ ID NO: 1196 - protein, 63 aa, Streptococcus pneumoniae
MIEGDRDCADIVTQLTAVKSSVERVIEMIITENLTECINQPLDDSEAQKERLEKAIRYLIKRK

SEQ ID NO: 1197 - protein, 98 aa, Streptococcus pneumoniae
METSISMADFYGKYQNENLELIDVREAHEFQAGHAPGAKNLPLSTLEQGYKELKPDHEYYVICQGGVRSASTCQFLSSQGLTVTNVEGGMNAWPGQVE

SEQ ID NO: 1198 - protein, 50 aa, Streptococcus pneumoniae; identical to SEQ ID NO: 86

SEQ ID NO: 1199 - protein, 52 aa, Streptococcus pneumoniae; identical to SEQ ID NO: 87

SEQ ID NO: 1200 - protein, 179 aa, Streptococcus pneumoniae
MKLLSIAISSYNAAAYLHYCVESLVIGGEQVGILIINDGSQDQTQEIAECLASKYPNIVRAIYQENKGHGGAVNRGLAEASGRYFKVVDSDDWVDPRAYLKILETLQEFESKGQEVDVFVTNFVYEKEGQSCKKSMSYDSVLPVRQIFGWDQVGNFSKGQYIMMHSLIYRTDLLRASQF

SEQ ID NO: 1201 - protein, 136 aa, Streptococcus pneumoniae
MYYLPVDFYRYLIGREDQSVNEQVMIKCIDQQLKVNRLLVDQLDLSQVSHPKMREYLLNHIEITTVISSTLLNRSGTAEHLAKKRQLWTYIQQKNPEVFQAIRKTMLSRLTKHSVLPDRKLSNVVYQITKSVYGFN

SEQ ID NO: 1202 - protein, 73 aa, Streptococcus pneumoniae; identical to SEQ ID NO: 617

SEQ ID NO: 1203 - protein, 41 aa, Streptococcus pneumoniae; identical to SEQ ID NO: 92

SEQ ID NO: 1204 - protein, 70 aa, Streptococcus pneumoniae
MKIKEQTRKLAAGSSKHCFKVVDGTDEVSSKHCFKVVDGTDEVSSKHCFEVVDRTDEVSNHIRQGDVDVV

SEQ ID NO: 1205 - protein, 85 aa, Streptococcus pneumoniae; identical to SEQ ID NO: 620

SEQ ID NO: 1206 - protein, 46 aa, Streptococcus pneumoniae; identical to SEQ ID NO: 79

SEQ ID NO: 1207 - protein, 242 aa, Streptococcus pneumoniae
MSNVDKIRKIHIIVCWMYIFLSFRAIINDTEYFLLIFLAFIYSIVSLPLYSVKNKIVSICLVINSILLMSFPILINKFFPESFLTYIVLISVFITELIIFHLIGKDFDTKLTNEYKKISQFRSKVSQSPWIKYLEISSFILTIFPSILYGTVDNHVLTLIFLIKICVDTTIKFLFIRLFDTSTLMKRRIFFLFALDVIAYLFLGYLLVIQKAGYLFSVLLLFSNFSVPFIKEKEYELFKNSK

SEQ ID NO: 1208 - protein, 179 aa, Streptococcus pneumoniae
MNKKKMILTSLASVAILGAGFVASSPTVVRAEDAPQVVEKSSLEKKYEEAKTKADTAKKDYETAKKKAEDAQKKYDEDQKKTEEKAKKEKEAAKKVDDASLAVQKAYVEYRKVQESRSNYRNRSDYNKKLAEAQVKIDEANKKLTAANNEFKTVRAVVVPEPNALAETKKKAEEAKAEK

SEQ ID NO: 1209 - protein, 509 aa, Streptococcus pneumoniae
LEQEVATAQHQVDNLKKLLAGVDPDDTEAIEAKLKKGEAELNAKQAELAKKQTGLEKLLDSLDPEGKTQDELDKEAAEAELNKKVESLQNKVADLEKEISNLEILLGGADSEDDTAALQNKLAAKKAELAKKQTELEKLLDSLDPEGKTQDELDKEAAEAELDKKADELQNKVADLEKEISNLEILLGGADPEDDTAALQNKLATTKAELEKTQKELDAALNELGPDGDEEETPAPAPQPEQPAPAPAPKPEQPAPAPKPEKSADQQAEEDYARRSEEEYNRLTQQQPPKAEKPAPAPAPKPEQPAPAPKTGWKQENGMWYFYNTDGSMATGWLQNNGSWYYLNSNGAMATGWAKVNGSWYYLNANGSMATGWVKDGDTWYYLEASGAMKASQWFKVSDKWYYVNSNGAMATGWLQYNGSWYYLNANGAMATGWAKVNGSWYYLNANGSMATGWVKDGDTWYYLEASGAMKASQWFKVSDKWYYVNGLGALAVNTTVDGYEVNANGEWV

SEQ ID NO: 1210 - protein, 41 aa, Streptococcus pneumoniae
LTISFKKQFLSSSLSSLTKRVIMNTAQATFNREAHTTFNRE

SEQ ID NO: 1211 - protein, 52 aa, Streptococcus pneumoniae
MKIKEQTRKLAVGCSKHCFEVVDRTDEVSSKHRFEVVDRTDEVSNIYTARRS

SEQ ID NO: 1212 - protein, 38 aa, Streptococcus pneumoniae; identical to SEQ ID NO: 635

SEQ ID NO: 1213 - protein, 40 aa, Streptococcus pneumoniae; identical to SEQ ID NO: 109

SEQ ID NO: 1214 - protein, 325 aa, Streptococcus pneumoniae
MTYNEKRLTNSLERVHMEQLKNTTDLLGLKDKNIKILSVLKYQTHLVVQAKLDSPAPPCPHCQGKMIKYDFQKASKIPLLDCQGLPTVLHLKKRRFQCKNCLKVVVSQTSIVKKNCQISNMVRQKIAQLLLEKQSMTEIAHRLAVSTSTVIRKLREFKFETDWTKLPKVMSWDEYSFKKSKMSFIAQDFESKSILAILDGRTHAVIRNHFQRYQREVRELVEVITMDMYSPYYRLAKQLFPKAKIVLDRFHIVQHLSRAMNRVRIQIMNQFDRKSLEYRALKRFWNPRFFVSRLGLNQSTGLIYYTRIASSSVRNDSISPRFECT

SEQ ID NO: 1215 - protein, 67 aa, Streptococcus pneumoniae
MGYSLKKSCTYCEQDPEKVNRFLKELNHLSYLTPIYIYETGVETYFYLEYDRALSRQLVSLEEDIII

SEQ ID NO: 1216 - protein, 390 aa, Streptococcus pneumoniae
MNIAVIGLGHVGLAYALLFASKYKVVAYDIDSVKINNLKKGILPSKNEELMKFFCENNLNITFFDTFSEIKNNIDYYIIALPTDYDEKIGSFNTYEIEQTVSKILRVKPNGKIILKSTVPFGFSNKLKRLFDTKNIIFVPEFLREGCSIYDNLYPSRIVVGDETVEGRKIAELFLSISTHSTANIKNVMLVSPTEAEAIKLFSNTFLALRVAFFNELDSFAERRSLNAEVVIKGVCLDPRIGNFYNNLSFGFGGYCLPKDTKQLKKEFIEINAPVIEAIDISNTNRKQFIVKQILERKPKIVGIYKLGMKYNSDNYKESAILSIINELLIVGIKILVYEPNLNVSIDNVIFEKNFELFTKQSDLIVANRWDRGLEAYKDKVYTRGIWIRD

SEQ ID NO: 1217 - protein, 66 aa, Streptococcus pneumoniae
MLNLQFAETMELTEAELEIVYGGEFGNNAVIPAGAWGGFGTPWSITNFWKKNFNDRPDFDSDRRRY

SEQ ID NO: 1218 - protein, 136 aa, Streptococcus pneumoniae
MGLDVGSKTVGVAISDPLGFTAQGLEIIQINEEQGQFGFDRVKELVDTYKVERFVVGLPKNMNNTSGPRVEASQAYGAKLEEFFGLPVDYQDERLTTVAAERMLIEQADISRNKRKKVIDKLAAQLILQNYLDRKF

SEQ ID NO: 1219 - protein, 38 aa, Streptococcus pneumoniae
LNPSYSFGKKDQFALEHCFCIKLSIFARAVTLFVSCIN

SEQ ID NO: 1220 - protein, 137 aa, Streptococcus pneumoniae
MITGTAFILIMSLSARKLPYTIRSSVASLQQIAPSIEEAAESLGSSRLNIFAKITTPMMLSDIISGAILSWVTLISELSTSILLYNVKTRTMTVAIYTEVLRGNYGVAAALSTILTVLTVGSLLLFMKISKSNSITL

SEQ ID NO: 1221 - protein, 190 aa, Streptococcus pneumoniae
MLIGEGYRTFPVLIYTQFISEVGGNSAFAIMAIIIALAIFLIQKHIANRYSFSMNLLHPIEPKKTTKGKMAAIYATVYGIIFISVLPQIYLIYTSFLKTSGMVFVKGYSPNSYKLAFNRMGSAIFNTIRIPLIALVLVVLFTTFISYLAVRKRNLFTNLIDSLSMVPYIVPGTVLGIAFISLVYLEVDFL

SEQ ID NO: 1222 - protein, 208 aa, Streptococcus pneumoniae
MECKKLNIWTASSFFLFLTYLVFLVYPIVTVLKQALIHEGQFSLANFVTFFSKAYYSETLVNSFRVSITATVTSLVVGTLLAYLFSMYDFKGKKFLQILIIIASMSAPFVGAYSWILLLGRNEVITKFLTNALYLPAIDIYGFKGIVLVFTLQLFPLVFLYVAGTMNSIDNSLLEAAESMGSFGFKPIVTVVLPLLVPTLLAAPCLYL

SEQ ID NO: 1223 - protein, 101 aa, Streptococcus pneumoniae
LLSTTEFIGLSIRILSNLHEFKILVGLLNQFFFWNLLLHKTKSNVVSDSQMWENSVVLENQPDIAFAGFHIIDFCIIEVKFSIFDTVETCNHTKKGRFPTS

SEQ ID NO: 1224 - protein, 138 aa, Streptococcus pneumoniae; identical to SEQ ID NO: 654

SEQ ID NO: 1225 - protein, 48 aa, Streptococcus pneumoniae
VLKIRYHKQFKKDFKLAMKRGLNAELLEEVLKIWFKKKNFLLDIVIIN

SEQ ID NO: 1226 - protein, 76 aa, Streptococcus pneumoniae
MLGSMFVGLLVGFLAGTLTNRGEHMGCFGKMFLGWIGAFIGHLLFGTWGPIIAGTAIIPAVLGSMIVLAIFWRRGS

SEQ ID NO: 1227 - protein, 56 aa, Streptococcus pneumoniae
MIDDIPKRVNDVIGQAGNNAKTSRPHVGIGKSHISVPFLFPYHTANRIKNQEKVIF

SEQ ID NO: 1228 - protein, 123 aa, Streptococcus pneumoniae
VAIDKIAGITSEKDSRAHQIFRISPTCSRCFCNDELVKWVARTIFLQLTKRCCLRSGNITRSNSVTLDIGSTVFRRNVAGQHFQAPFSSSISANCFTSQFAHHRTNIDNLSMPFLYHRRNNCL

SEQ ID NO: 1229 - protein, 75 aa, Streptococcus pneumoniae; identical to SEQ ID NO: 123

SEQ ID NO: 1230 - protein, 111 aa, Streptococcus pneumoniae
MKSLARLLIIHVFISIFLFFALISGAVSHTVLLLLLLFLPALNKGLEKIQSKRIPVLNAALFFLLISFPQLLTNPVQWKFSIFLVVTIISSLAYFYNFYQVVKEVDQKQLI

SEQ ID NO: 1231 - protein, 63 aa, Streptococcus pneumoniae
LEAASEIETEFQSWIVLVVFNHIDGLSRDTDILGELELGNAQFLAKFFHTIHLVSFLICVVYI

SEQ ID NO: 1232 - protein, 750 aa, Streptococcus pneumoniae
MKWTKRVIRYATKNRKSPAENRRRVGKSLSLLSVFVFAIFLVNFAVIIGTGTRFGTDLAKEAKKVHQTTRTVPAKRGTIYDRNGVPIAEDATSYNVYAVIDENYKSATGKILYVEKTQFNKVAEVFHKYLDMEESYVREQLSQPNLKQVSFGSKGNGITYANMMSIKKELETAEVKGIDFTTSPNRSYPNGQFASSFIGLAQLHENEDGSKSLLGTSGMESSLNSILAGTDGIITYEKDRVGNIVPGTELVSQQTVDGKDVYTTLSSPLQSFMETQMDAFLEKVKGKYMTATLVSAKTGEILATTQRPTFNADTKEGITEDFVWRDILYQSNYEPGSAMKVMTLASSIDNNTFPSGEYFNSSEFKIADATTRDWDVNDGLTTGGMMTFLQGFAHSSNVGMSLLEQKMGDATWLDYLKRFKFGVPTRFGLTDEYAGQLPADNIVSIAQSSFGQGISVTQTQMLRAFTAIANDGVMLEPKFISAIYDTNNQSVRKSQKEIVGNPVSKEAASTTRNHMILVGTDPLYGTMYNHYTGKPIITVPGQNVAVKSGTAQIADEKNGGYLVGSTNYIFSVVTMNPAENPDFILYVTVQQPEHYSGIQLGEFATPILERASAMKESLNLQSPAKNLDKVTTESSYAMPSIKDISPGELAEALRRNIVQPIVVGTGTKIKETSVEEGTNLAPNQQVLLLSDKVEEIPDMYGWKKETAETFAKWLDIELEFEGSGSVVQKQDVRTNTAIKNIKKIKLTLGD

SEQ ID NO: 1233 - protein, 38 aa, Streptococcus pneumoniae; identical to SEQ ID NO: 126

SEQ ID NO: 1234 - protein, 136 aa, Streptococcus pneumoniae; identical to SEQ ID NO: 660

SEQ ID NO: 1235 - protein, 41 aa, Streptococcus pneumoniae; identical to SEQ ID NO: 128

SEQ ID NO: 1236 - protein, 164 aa, Streptococcus pneumoniae
LTNQDLQAGTYLVKDYREIILSQDALEKVATNLKLDMPAKTLASKVQVAVPADTRIVSISVKDKQPEEASRIANSLREVAAEKIVAVTRVSDVTTLEEARPATTPSSPNVRRNSLFGFLGGAVVTVIAVLLIELLDTRVKRPEDVEDVLKIPLLGLVPDFDKIK

SEQ ID NO: 1237 - protein, 229 aa, Streptococcus pneumoniae
MPTLEISQAKLDSVKKAEEYYNALCTNLQLSGDGLKVFSITSVKIGEGKSTTSANIAWAFARAGYKTLLIDGDIRNSVMLGVFKARNKITGLTEFLSGTTDLSQGLCDTNIENLFVIQAGSVSPNPTALLQSKNFTTMLETLRKYFDYIIVDTAPVGVVIDAAIITRNCDASILVTEAGEINRRDIQKAKEQLEHTGKPFLGIVLNKFDTSVDKYGSYGNYGNYGKNKK

SEQ ID NO: 1238 - protein, 455 aa, Streptococcus pneumoniae
MNEKILRSSLAIIQSFLVILLTYLLSAVRETEIVSTTAIALYILHYFVFYISDYGQDFFKRRYLIELVQTLKYILFFALAIGISNFFLEDRFSISRRGMIYFLTLHALLVYVLNLFIKWYWKRAYPNFKGSKKILLLTATSRVEKVLDRLIESNEVVGKLVAVSVLDKPDFQHDCLKVVAEGEIVNFATHEVVDEVFINLPGEKYNIGELVSQFETMGIDVIVNLNAFDRSLARNKQIREMAGLNVVTFSTTFYKTSHVIAKRIIDIVGALVGLILCGLVSIVLVPLIRKDGGSAIFAQTRIGKNGRQFTFYKFRSMCVDAEAKKRELMEQNTMQGGMFKVDDDPRITKIGCFIRKTSLDELPQFYNVLKGDMSLVGTRPPTVDEYEHYTPEQKRRLSFKPGITGLWQVSGRSEIKNFDEVVKLDVAYIDGWTIWKDIEILLKTVKVVFMRDGAK

SEQ ID NO: 1239 - protein, 392 aa, Streptococcus pneumoniae
MKKSVYIIGSKGIPAKYGGFETFVEKLTAFQQDKAIQYYVACMRENSAKSGTTEDVFEHNGAICYNVDVPNIGPARAIAYDIAAINRAIEIAKENKDEDPIFYILACRIGPFIHGIKKKIQEIGGTLLVNPDGHEWLRAKWSAPVRRYWKISEGLMVKHADLLVCDSKNIEKYIQEDYKQYQPKTTYIAYGTDTTRSVLKSSDEKVRSWFKEKNVSENEYYLVVGRFVPENNYESMIRGFLASNSKKDFVLITNVEQNKFYNQLLAKTGFDKDPRVKFVGTVYEQELLKYIRENAFAYFHGHEVGGTNPSLLEALASTKLNLLLDVGFNREVAEDGAIYWKKDNLHEIIETSEQKTQKEIDEKDILSIKQVTERFSWELIVNEYEKLFLCEK

SEQ ID NO: 1240 - protein, 397 aa, Streptococcus pneumoniae
VTIKINNLFFVCLSFFGIVLSSSQVIVNLGLSSIIQYISYFMLMLCVFLTLIKNTLNVFANRIIYFLIISFLFIIGINLQNLPLSRKIYLSFSMLIISSLSTLPIKLINNLSDLRRISYYLLHSIFLSVFLGLVFKISLVTVAVEGIGFSYGFNGGLTHKNFYAITILVSYILLYVSRKYDAKHQIDSFVLWLDLFLLLISNTRTVYIILVVFWIIINRNFINNIKKEHRLVVTATTIVISLLALTFFFKHIINNSESYSHRVLGVVNFFKYYESDRFHLFFGDAELAFGNTTKGYGHNIRSVLGWDGTVEMPLLSVMIKNGYVGLVGYIIVLFKFISSIISVKNSTKKNIGLSIFIPLLLSATVENYIVNISFVFMPVCFCILCSIKNIKLVNNRK

SEQ ID NO: 1241 - protein, 323 aa, Streptococcus pneumoniae
MEKLVSIILPVYNVEQYIKNCLESIQQQTYSNLEVIIVNDGSTDKSVEYCEQICKIDSRFSITHKENGGLSDARNVGIDKSKGDYLIFVDSDDFVSQDMVSYLVSCMENNEADIAICDPVHYYSDRQNNDLNIFSPASNVKVYETTEALCEMFYQKSFLVSAWAKIFKRELFDDIRFPVGKLFEDSAIMYLLFEKCETIAYSDAELYAYVHRDNSITTKKFSDRDLDILEITNTIINHYGDNLRVYTAAVSYKVSACFRILLNSPSGEKYKKVQKECLSYILQNWRNILFNNNVRLKNKLALISITIFNPFVKFIYSKVNRWE

SEQ ID NO: 1242 - protein, 410 aa, Streptococcus pneumoniae
MNKYEERYQENLSKNDFYKLINKSYLSDKELQVQQVKAGIVLPPKAFETKLSNKLGLQKSLHGKGGVVDSNGNYIELSAQKAVGMRNRVYGPYKINYDNLPIRNEKVIYLNYFIKQWGHFLLDVVGRLWYPLLQDNDTKLVYTCYAGTETKIEGNYLEFLKLLGIDQSRLIMINCPTQFSEVIIPESSILPGGYYTKEYKQLFSSVVENIKLDKYDVNAKMIYCSRSKLGIAKSKEFGEDGIEGIFKQNGYTSVYMETMSLEEQIKTLLSAKTIVLTSGSLAHNLLFVNKDIDVFILNKTYRVNLHQFLINEISDATVRFVDIYRSPLPILYGYGPFLMDLTKPLANFLDDNEFVYEKGTVLSKKDYFKYYLKWLWSYRFFLFRLNGIKEGNSEFEKSFKIIRRYYKTGR

SEQ ID NO: 1243 - protein, 461 aa, Streptococcus pneumoniae
MSKYKELAKNTGIFALANFSSKILIFLLVPIYTRVLTTTEYGFYDLVYTTIQLFVPILTLNISEAVMRFLMKDGVSKKSVFSIAVLDIFIGSIAFALLLLVNNLFSLSDLISQYSIYIFVIFVFYTLNNFLIQFSKGIDKIGVTAISGVISTAVMLAMNVILLVVFDWGLLGFFIANVCGYVIPCIYIVSRLRLWELFEIKIDKKLQWEMVYYALPLVLNILSWWVNNTSDRYIVTAIVGIQASAIISVAYKIPQILSTISAIFIQSWQISAIKIQEDKSDTTFVSNMLLYYNALLLIIASGIILFVKPISNILFGISFYSAWELVPFLIISSLFNAISGCIGAIMGAKMDTHNIAKSALVGMIANIILNIVLTFLMGPQGITISTLIASFLIFYMRKDSVKEINSETYRAIYLSWILLVVEACLLIYMDFIIGALIAMVINLFLLKDVIKPLYLKIFKRN

SEQ ID NO: 1244 - protein, 382 aa, Streptococcus pneumoniae
MIVLQYFKILARFVFMFLISAVLLPFKIKPNKIVFINFNGKGYGDNPKSICEYLRTTYPDLDLVWLARDNEGFPDGVRVVKYGTFQAFYEQASSKVWVYNVRAFARILKKRGQIYIQTWHGASSFKLIEKQADLPINYVLEAKYDARVTDIMISDSRKQTEEFQKYFWYSGEIFEVGMPRNDALFHYKEDYDKLNNIRKELSIHSDDYVILYAPTFRDDGDASYLDINFERLLQCVEHGIKKKCKFLIRLHPNHSHLCNNISFNKNIINATFYSDMQELTLLADVLVTDYSSSIFDFMLLNKPYVRYVNDLEKYAELRGVSDTYYELPDSIIKTAEELYDLLPKKIENFDYDSIKKYRNEILCPIFNGTASENVGGRIIQEL

SEQ ID NO: 1245 - protein, 342 aa, Streptococcus pneumoniae
LKNNDLKIGSGAIHQISATLSQNSISGKILYCADPVVDDLYGSIVRSQIEEIGRVKEESCNYNTIAYAMNIAERAIATDIDCIVGMGGGRVLDVCKYASFISKRPYLSIPTTAANDGIASPVAVLKRQDDRPKSLGAAIPSMTLIDIDVIASGPIQNIKAGIGDTISNYTALKDWELAVERGKDEMHGFAYLMSQNSLDALMKTKYNSITPDFIEVLVNSLVLSGIAMDFAGSSRPVSGSEHLFSHALDYYGSTRNLHGIQVALGTVAVLKLIENSVDTVVDYLQRFEVHINPKLLGIDEELFIYCMQHATKMRSNRYTYLHEVDLSTDRLKQIYKELISEL

SEQ ID NO: 1246 - protein, 234 aa, Streptococcus pneumoniae
MKALILAAGLGTRLAPITNEVPKSLVPVNGKPILMKQIENLYQNNITDITIIAGYKSSVLTDAVTEKYPEINIIDNVDFKTTNNMYSAYLGKAAMGDSDFLMMNADVFYDASVIKSLLLHKAPNAIVTDLGIYIEESMKVVEKNGRLVEISKQISPEETLGASIDVYKFSYEAGARFFEKCKEFIEDKRELQMWSEVALNAILSEVEFVACPLEGRWLEIDNHEDLVAAEKLFA

SEQ ID NO: 1247 - protein, 277 aa, Streptococcus pneumoniae
MKLTNRVDYFGADISELQNKKLFLFDMDGTIYEEDRLFEGTLELLDYIHNIGGEYIFITNNSSKSVVDYVEKVNRLGIKAERDNFFTSAQATIVYIKENYPKSKVYCQGTKSLIKELSDAGIDVTEQVSADIDVVLVGFDTELTSDKIRNTCEILSTKDVPFIATNPDIRCPVSFGFIPDCGSICDMISKSVDRKPVYIGKPEPTMVDIVRKKLNYSLFETVVIGDRLYTDIMTGINAGVTSVCVLTGEATVNDIQQDSIKPTYTFKNVKEMWKGIV

SEQ ID NO: 1248 - protein, 289 aa, Streptococcus pneumoniae
MKGIILAGGSGTRLYPLTRAASKQLMPVYDKPMIYYPLSTLMLAGIRDILIISTPQDLPRFKELLQDGSEFGIKLSYAEQPSPDGLAQAFIIGEEFIGDDSVALILGDNIYHGPGLSTMLQKAAKKEKGATVFGYHVKDPERFGVVEFDENMNAISIEEKPEYPRSNYAVTGLYFYDNDVVEIAKSIKPSPRGELEITDVNKAYLDRGDLSVELMGRGFAWLDTGTHESLLEASQYIETVQRMQNVQVANLEEIAYRMGYISREDVLALAQSLKKNEYGQYLLRLIGEA

SEQ ID NO: 1249 - protein, 197 aa, Streptococcus pneumoniae
MTDNFFGKTLAARKVEAIPCMLEFDIPVHGDNRGWFKENFQKEKMLPLGFPESFFAEGKLQNNVSFSRKNVLRGLHAEPWDKYISVADGGKVLGSWVDLREGETFGNTYQTVIDASKGIFVPRGVANGFQVLSDTVSYSYLVNDYWALELKPKYAFVNYADPSLGIEWENIAEAEVSEADKNHPLLKDVKPLKKEDL

SEQ ID NO: 1250 - protein, 349 aa, Streptococcus pneumoniae
MTEYKNIIVTGGAGFIGSNFVHYVYENFPDVHVTVLDKLTYAGNRANIEEILGNRVELVVGDIADAELVDKLAAQADAIVHYAAESHNDNSLNDPSPFIHTNFIGTYTLLEAARKYDIRFHHVSTDEVYGDLPLREDLPGHGEGPGEKFTAETKYNPSSPYSSTKAASDLIVKAWVRSFGVKATISNCSNNYGPYQHIEKFIPRQITNILSGIKPKLYGEGKNVRDWIHTNDHSSGVWTILTKGQIGETYLIGADGEKNNKEVLELILKEMGQAADAYDHVTDRAGHDLRYAIDASKLRDELGWKPEFTNFEAGLKATIKWYTDNQEWWKAEKEAVEANYAKTQEIITV

SEQ ID NO: 1251 - protein, 283 aa, Streptococcus pneumoniae
MILITGANGQLGTELRYLLDERNEEYVAVDVAEMDITNEEMVEKVFEEVKPTLVYHCAAYTAVDAAEDEGKELDFAINVTGTKNVARASEKHGATLVYISTDYVFDGKKPVGQEWEVDDRPDPQTEYGRTKRMGEELVEKHVSNFYIIRTAWVFGNYGKNFVFTMQNLAKTHKTLTVVNDQYGRPTWTRTLAEFMTYLAENRKEFGYYHLSNDATEDTTWYDFAVEILKDTDVEVKPVDSSQFPAKAKRPLNSTMSLAKAKATGFVIPTWQDALQEFYKQEVR

SEQ ID NO: 1252 - protein, 149 aa, Streptococcus pneumoniae
LVNCEPLEAYRQLEEAELVGCWAHVRRKFFEATPKQADKSSLGAKGLAYCNQLFSLERDWEALPADERLQKRQEELQPLMEDFFAWCRRQSVLSGSKLGRAIEYSLKYKETFKTILKDGHLVLSNNLAERAIKSLVMGRSKRVQWTLLA

SEQ ID NO: 1253 - protein, 1767 aa, Streptococcus pneumoniae
MNKGLFEKRCKYSIRKFSLGVASVMIGAAFFGTSPVLADSVQSGSTANLPADLATALATAKENDGRDFEAPKVGEDQGSPEVTDGPKTEEELLALEKEKPAEEKPKEDKHAAAKPETLKTVTPEWQTVEKKEQQGTVTIREEKGVRYNQLSSTAQNDNAGKPALFEKKGLTVDANGNATVDLTFKEDSEKGKSRFGVFLKFKDTNNNVFVGYDKDGWFWEYKSPTTSTWYRGSRVAAPETGSTNRLSITLKSDGQLNASNNDVNLFDTVTLPAAVNDHLKNEKKILLKAGSYDDERTVVSVKTDNQEGVKTEDTPAEKETGPEVDDSKVTYDTIQSKVLKAVIDQAFPRVKEYSLNGHTLPGQVQQFNQVFINNHRITPEVTYKKINETTAEYLMKLRDDAHLINAEMTVRLQVVDNQLHFDVTKIVNHNQVTPGQKIDDERKLLSSISFLGNALVSVSSDQTGAKFDGATMSNNTHVSGDDHIDVTNPMKDLAKGYMYGFVSTDKLAAGVWSNSQNSYGGGSNDWTRLTAYKETVGNANYVGIHSSEWQWEKAYKGIVFPEYTKELPSAKVVITEDANADKNVDWQDGAIAYRSIMNNPQGWEKVKDITAYRIAMNFGSQAQNPFLMTLDGIKKINLHTDGLGQGVLLKGYGSEGHDSGHLNYADIGKRIGGVEDFKTLIEKAKKYGAHLGIHVNASETYPESKYFNEKILRKNPDGSYSYGWNWLDQGINIDAAYDLAHGRLARWEDLKKKLGDGLDFIYVDVWGNGQSGDNGAWATHVLAKEINKQGWRFAIEWGHGGEYDSTFHHWAADLTYGGYTNKGINSAITRFIRNHQKDAWVGDYRSYGGAANYPLLGGYSMKDFEGWQGRSDYNGYVTNLFAHDVMTKYFQHFTVSKWENGTPVTMTDNGSTYKWTPEMRVELVDADNNKVVVTRKSNDVNSPQYRERTVTLNGRVIQDGSAYLTPWNWDANGKKLSTDKEKMYYFNTQAGATTWTLPSDWAKSKVYLYKLTDQGKTEEQELTVKDGKITLDLLANQPYVLYRSKQTNPEMSWSEGMHIYDQGFNSGTLKHWTISGDASKAEIVKSQGANDMLRIQGNKEKVSLTQKLTGLKPNTKYAVYVGVDNRSNAKASITVNTGEKEVTTYTNKSLALNYVKAYAHNTRRNNATVDDTSYFQNMYAFFTTGSDVSNVTLTLSREAGDEATYFDEIRTFENNSSMYGDKHDTGKGTFKQDFENVAQGIFPFVVGGVEGVEDNRTHLSEKHDPYTQRGWNGKKVDDVIEGNWSLKTNGLVSRRNLVYQTIPQNFRFEAGKTYRVTFEYEAGSDNTYAFVVGKGEFQSGRRGTQASNLEMHELPNTWTDSKKAKKATFLVTGAETGDTWVGIYSTGNASNTRGDSGGNANFRGYNDFMMDNLQIEEITLTGKMLTENALKNYLPTVAMTNYTKESMDALKEAVFNLSQADDDISVEEARAEIAKIEALKNALVQKKTALVADDFESLDAPAQPDEGLENAFDGNVSSLWHTSWNGGDVGKPATMVLKEATEITGLRYIPRGSGSNGNLRDVKLVVTDESGKEHTFAATDWPDNNKPKDIDFGKTIKAKKIVLTGTKTYGDGGDKYQSAAELIFTRPQVAETPLDLSGYEAALAKAQKLTDKDNQEEVASVQASMKYATDNHLLTERMVEYFADYLNQLKDSATKSDAPTVEKPEFKLSSLASEQGKTPDYKQEIDRPETPEQILPATGESQSDTALFLAGVSLALSALFVVKTKKD

SEQ ID NO: 1254 - protein, 68 aa, Streptococcus pneumoniae; identical to SEQ ID NO: 141

SEQ ID NO: 1255 - protein, 38 aa, Streptococcus pneumoniae
MLNLMWMKIFHRNRTFLFCFLGFKVDVISIINARIVRR

SEQ ID NO: 1256 - protein, 40 aa, Streptococcus pneumoniae
VYNSQALRQIVVVGSIDHLFKRHSSICEIFGLRKRWLSFL

SEQ ID NO: 1257 - protein, 113 aa, Streptococcus pneumoniae
MTSIIFSAKDIFEQEFGREVRGYSKVEVDEFLDDVIKDYETYATLVKSLRQEIADLKEELTRKPQVSSAPSPSHPDPIDVAASSSMTNFDILKRLNRLEKEVFGKQILDNTDL

SEQ ID NO: 1258 - protein, 43 aa, Streptococcus pneumoniae
LISIKHFFWLPLSKKMIIDIIVNKNPDRFCMIEKVKKTMAENR

SEQ ID NO: 1259 - protein, 57 aa, Streptococcus pneumoniae; identical to SEQ ID NO: 153

SEQ ID NO: 1260 - protein, 37 aa, Streptococcus pneumoniae
VNPLYLCSSDSNDFFKYTWGDNDFAKLFFNSHRMTSF

SEQ ID NO: 1261 - protein, 62 aa, Streptococcus pneumoniae; identical to SEQ ID NO: 157

SEQ ID NO: 1262 - protein, 323 aa, Streptococcus pneumoniae
MLYVGIDIAKNKHDVTALNVPGKTVLKPLTFSNNKAGFELLDLSLRQLNQDCLIALKLLSDPNREQFQHDNRQVDLKILARHIHRLKKKQSDWKVQYTRCLDIIFPELDKIVGKHSEYTYQLLTRYPNPQKRIEAGFDKLIEIKRLTASKIQDILSVAPRSIETTSPAREFEIIEIIKHYKRLIDKAETCVNDLMAEFNSVITTVTGIGGRLGAVILAEIRNIHAFDNPAQLQAFAGLDSSIYQSGQIDLAGRMIKRGSPHLRWALIQAAKACARFSPAFKAYLKTKLEQGKHYNVAIIHLAKKLIRTLFYILKKSCHLTNKK

SEQ ID NO: 1263 - protein, 56 aa, Streptococcus pneumoniae; identical to SEQ ID NO: 159

SEQ ID NO: 1264 - protein, 72 aa, Streptococcus pneumoniae; identical to SEQ ID NO: 698

SEQ ID NO: 1265 - protein, 102 aa, Streptococcus pneumoniae; identical to SEQ ID NO: 161

SEQ ID NO: 1266 - protein, 83 aa, Streptococcus pneumoniae; identical to SEQ ID NO: 162

SEQ ID NO: 1267 - protein, 85 aa, Streptococcus pneumoniae; identical to SEQ ID NO: 701

SEQ ID NO: 1268 - protein, 426 aa, Streptococcus pneumoniae
LVEIVRGGSPRPIKDYLTSEVDGINWIKIGDTEKGEKYINNVKEKIKKSGLNKTRFVKKGTFLLTNSMSFGRPYILNVDGAIHDGWLAISNYENSLNKDYLFYILSSNVVYSQFLSLISGAVVKNLNSDKVASILIPLPPLSEQQRIIEAIESALEKVDEYAESYNRLEQLDKEFPDKLKKSILQYAMQGKLVEQDPNDESVEVLLEKIRAEKQKLFEEGKIKKKDLDISIVSQGDDNSYYGNIPMNWVVIKIKDIFSMNTGLSYKKGDLSINNKGVRIIRGGNIKPLEFSLLDNDYYIDTQFISSEQVYLKHNQLITPVSTSLEHIGKFARIDKDYDGVVAGGFIFQLTPFESSEIISKFLLFNLSSPLFYKQLKAITKLSGQALYNIPKTTLSELLIPLAPFEEQELITQKVEKLFEKVNQLWK

SEQ ID NO: 1269 - protein, 63 aa, Streptococcus pneumoniae
VDRTDEVSSKHCFEVVDTTDEVSSKHCFEVVDRTDEVSNHTHDKPTLTWFEEIFEEYHSPFHN

SEQ ID NO: 1270 - protein, 40 aa, Streptococcus pneumoniae
LDNIHIVLDSLNAVSGIQDFICDGLAIFCDQITSGCSSCK

SEQ ID NO: 1271 - protein, 517 aa, Streptococcus pneumoniae
MKSTLGIISVGLVITYILQQVMSFSRDYLLTVLSQRLSIDVILSYIRHIFELPMSFFATRRTGEIISRFTDANSIIDALASTILSLFLDVSILILVGGVLLAQNPNLFLLSLISIPIYMFIIFSFMKPFEKMNHDVMQSNSMVSSAIIEDINGIETIKSLTSEENRYQNIDSEFVDYLEKSFKLSKYSILQTSLKQGTKLVLNILILWFGAQLVMSSKISIGQLITFNTLFSYFTTPMENIINLQTKLQSAKVANNRLNEVYLVESEFQVQENPVHSHFLMGDIEFDDLSYKYGFGRDTLTDINLTIKQGDKVSLVGVSGSGKTTLAKMIVNFFEPYKGHISINHQDIKNIDKKVLRRHINYLPQQAYIFNGSILENLTLGGNHMISQEDILRACELAEIRQDIERMPMGYQTQLSDGAGLSGGQKQRIALARALLTKAPVLILDEATSGLDVLTEKKVIDNLMSLTDKTILFVAHRLSIAERTNRVIVLDQGKIIEVGSHQELMQAQGFYHHLFNK

SEQ ID NO: 1272 - protein, 195 aa, Streptococcus pneumoniae; identical to SEQ ID NO: 172

SEQ ID NO: 1273 - protein, 82 aa, Streptococcus pneumoniae
MDTKMMSQFSVMDTEMLACVEGGGCNWGDFAKAGVGGAAVVAALGCAAGGVKYGKILGPWGAAIGGIGGAVVCGYLAYTATS

SEQ ID NO: 1274 - protein, 53 aa, Streptococcus pneumoniae
MKKKILIIFVLYLIMSIFLYPLRESIWYNLFYTIAYMIAVMIYFSLIKKKEKK

SEQ ID NO: 1275 - protein, 37 aa, Streptococcus pneumoniae
LNCKGNDHPKEFHNPNNRFDKKNSKKTKKNFILSPLA

SEQ ID NO: 1276 - protein, 80 aa, Streptococcus pneumoniae
MKIKEQTRKLAAGCSKQCFEVVDRTDEVSSKHRFEVVDRTDEVSSKHRFEVVDRTDEVSSKHRFEVVDRTDEVSNIYTAR

SEQ ID NO: 1277 - protein, 55 aa, Streptococcus pneumoniae; identical to SEQ ID NO: 175

SEQ ID NO: 1278 - protein, 320 aa, Streptococcus pneumoniae
MSDVKEEVSSLSEKQLRQIDVEYAELNDSDIIERLAYLEINNNEKRIVISDIEPTKEIMSVSDQIFEIQKNFQKIKNMFELFISDVSDFLSIKNKLESKELEIEEADVNRFMIHLLSSGKLFVDFNENQIKQKYSKDSEEFDCIHGFASYQYDTNFAYRFCHSLRNYSQHTDLPINEVKAVSPDDETVIIDFYIDLDYLLNSNFKWKKLKGELIKLNQETSKIDAIALVKEYFNALTELYGNYNKLFLKLNHNTLVDIKSKLESLKLKHSRYYISKISKYDLKYNPGNYTMSPLAAFAEIEEIYIELSKIGLVKIVNKSN

SEQ ID NO: 1279 - protein, 251 aa, Streptococcus pneumoniae
MSKHPHYELLNLIGYGLAKFDKLFIKEFQCFSKSEFYRYVVSLGIAETTGVVKNRMDLFDPYFDNNRKGWWQKAEVYRFRKDLIDMMFGNEDVHSYAEIVKMLLASEGKKTGITIVEKPIVRTKFKRLQETGMEAENYFILHFDKEEKFQGGQLTDARLYGDGYDFQVDVQEYSYLAEVKGIRKSKGRVRLTAKEFEKVKEFQSDFILSLVTNLDDIPKLVLIDNPLKHFEFKKNIIKNEIIEYRSVEDLY

SEQ ID NO: 1280 - protein, 60 aa, Streptococcus pneumoniae
MFIAEFTAILLNEFPVALDSLVFMGFSMKLIHDLDTHTTHSTAKMLYNMKAIKNDFSIRE

SEQ ID NO: 1281 - protein, 37 aa, Streptococcus pneumoniae; identical to SEQ ID NO: 181

SEQ ID NO: 1282 - protein, 76 aa, Streptococcus pneumoniae
LCCNRHIANLDLEFISYHLGQVGFDTRISTGLGIFVTKIGNVLFDTDNQFASFLNVCDTCISLDWFGSSKAEKANQ

SEQ ID NO: 1283 - protein, 50 aa, Streptococcus pneumoniae
MKEIAFDAFYQLYQNDQLSLVDVREVDEFAALHLECAHNLPLSQLADSYD

SEQ ID NO: 1284 - protein, 153 aa, Streptococcus pneumoniae
MCLICQRIELIKAGQNPYFVKELETGYVVIGDYQYFKGYTLFLAKDHVTELHHMETSVKLRFLEEMSLVQEAVAKAFEAEKMNIELLGNGDAHAHWHLFPRRAGDMKSHGLNGRGPVWWVPWEEMAAEDCQVQSPELEEMIKILSHELEKYLA

SEQ ID NO: 1285 - protein, 238 aa, Streptococcus pneumoniae
MKKRYVILSGLLALTLAACSQEKTKVEENTQKTEQSSQPEGTVGSKSQASSQKKAEVSNKGSYYSIQGKYDEIILANKRYPLSKDYNPGENPTAKAELLKLIAAMQAEGYPISDQYSGFRSYETQAKLYQDYVNQDGKEAADRYSARPGYSEHQTGLAFDLIGTDGDLVTEEKAAQWLLDHAADYGFVVRYLKGKEKETGYMAEEWHLRYVGKEAKEIAASGLSLEEYYGFEGGDYVD

SEQ ID NO: 1286 - protein, 48 aa, Streptococcus pneumoniae
MKTKEQTRKLAAGCSKHCFEVVDRTDEVSNHTHGKATLTWFEEIFKEY

SEQ ID NO: 1287 - protein, 41 aa, Streptococcus pneumoniae; identical to SEQ ID NO: 184

SEQ ID NO: 1288 - protein, 39 aa, Streptococcus pneumoniae
VCFLGFQTILANPSKPQRQLPFLIFILDFFNYKHHKFLS

SEQ ID NO: 1289 - protein, 184 aa, Streptococcus pneumoniae
MEELVTLDCLFIDGTKIEANANKYSFVWKKTTEKFSAKLQEQIQVYFQEEITPLLIKYAMFDKEQKRGYKESAKNLANWHYNDKEDSYTHPDGWYYRFHHTKHQKTQTDFQQEIKVYYADEPESAPQKGLYMNERYQNLKAKECQALLSPQGRQIFAQRKIDVEPVFGQIKASLGYKRCNLRGK

SEQ ID NO: 1290 - protein, 81 aa, Streptococcus pneumoniae
MHIHYNTNQTTLPLEISSFLPQDHLVFTIEKVVNTLEDCHFHAFYHAFDRLSYHLKMLVSTLLFAYSQGIFSGRKIEKWKS

SEQ ID NO: 1291 - protein, 178 aa, Streptococcus pneumoniae
LRLWVIFVIMKVIKSYDTLNDYYRKLFGEKTFKVPIDAGFDCPNRDGTVAHGGCTFCTVSGSGDAIVAPDPPIREQFYKEIDFIHRKWPDVQKYLVYFQNFTNTHEKVEVIRERYEQAINEPGVVGINIGTRPDCLPDETIEYLAELSECMHVTVELGLQTTYEATSDLINRAHSYEL

SEQ ID NO: 1292 - protein, 148 aa, Streptococcus pneumoniae
VETVKRLRKYPKIEIVSHLINGLPGETHEMMVENVRRCVTDNDIQGIKLHLLHLMTNTRMQRDYHEGRLQLMSQDEYVRVICDQLEIIPKHIVIHRITGDAPRDMLIGPMWSLNKWEVLNSIEMEMRRRGSVQGCKAVKQEFENEKTT

SEQ ID NO: 1293 - protein, 37 aa, Streptococcus pneumoniae; identical to SEQ ID NO: 190

SEQ ID NO: 1294 - protein, 1889 aa, Streptococcus pneumoniae
VFKKDRFSIRKIKGVVGSVFLGSLLMAPSVVDAATYHYVNKEIISQEAKDLIQTGKPDRNEVVYGLVYQKDQLPQTGTEASVLTAFGYLSGDILKTLGLDTVLEETSAKPGEVTVVEVETPQSTTNQEQARTENQVVETEEAPKEEAPKTEESPKEEPKSEIKPTDDTLPKVEEGKEDSAEPAPVEEVGGEVESKPEEKVAVKPESQPSDKPTEEPKVEQVGEPVEPSEDEQAPTAPVEPEKQPEAPEEEKAVEETPKPEDKIKGIGTKEPVDKSELNNQIDKASSVSPTDYSTASYNDLGPVLETAKGVYASEPVKQPEVNSETNKLKTAIDALNVDKTELNNTIADAKTKVKEHYSDRSWQNLQTGVTEAEKVAANTDAKQSEVNSETASLKTAISRLNTDKVELENQLKIAQGKTETDFSMESWTVLSTAKNKAQEVKDNGTATQEQINEAEKSLKTALADLSVDKTALGSAIDTATKKNKENYTNQTWAELETALTAAKSVNTNESKQSDVNEAAEKLTATMEKLVELSEKPRLTLSIEKRDIDRKATVTYTLENPANTQIKSITATLKKGEEVVKDFVLTEENLKTNHLTALFEKLDYYKEYTLSTDMVYNRGNDDETESISEELIQLNLKKLELKDIQTVSLMKFENGQESQVTHLSDKPTDLSKLYLKVTSSTSKDAVLAVSSIEEEIIENKKIFKIHADTPELVVRKKDGSLSKGFDYYMERVIPHDGDIYYDFKDLISAMTSNPTGTFILGRDISSRNVKPDGNGKSYIKGEFKGKLLGTNDNVRHSIFDLEYPLFDTIKSGVVKDIDFKHVNMVFPDSNQGDNVATIARVIKDKTKIENVNVEGYLEGRDHVAGLVNNLEGNSEIENVSFTGKIKSKGGNSITAGIAGRNILSRVKRAYVNADIEVHRSSNSSMLVAVNGINADASGGWGTWGRLTESVAKGTLETKQGGQAGGASSTVWPYGAIDNVVSYAKVTKGKELFGSDGDLNYDWFMKKISNIFGVQGISSGDSGSDSKFTRISEEEANQKVASYNITAPNLMSDSSLLVDRLNESWKNTDQFESIQDYQAQNQLIYQNLTKFTPYYNKEFIVHEGNALTPEQEILKTKKIKSIVGLKGTEFVVDGSDIDTIMLHFEDGSQKRYKVTSTGKFSITNLPEYQVEDLNVVYTSEHIVHPLDSSLINNLVEELKKVELYTESTYQVLGIDKDNANKLNRTKRLFLDESLDAVKTQLPTFVKTMFENEWLHINGESSGAVAALRQKIMDNKTAILLALTYINRYYDVKFSDYNIKKLMLFKPTFHGEKIDLLDRLIRLGSSGENRLKGSENAETFKQLFASETKQKDLVTYLDYNRSLLTNYQTTGEWFKETTKDYIQFEERPSLVEEIKDAKYRVYDNLTAPYYQGYILPLLTLKNTHLAILSNYSTMTFVSREKRPNWKNEDFDKWVKYVATAHRNHVDTWYKILPDNIKGKMVKENVTAVWEGLSIPGSEWVDQNAVDRKGRDYAPAREFFNLVGGPMGGWYAYHGYGAHAGGRNRVNYEVFDVLSEYGISVFTHELTHVNDTWIYLGGYGRRENMGPEAYAQGLFQSPVPGQPGWGALGLNMAFERKNDGDLIYNASPTQFENRKELDSYMKNYNDTLMMVDYLEGDAVISKGKEAITKWFKKVEPKVVSQTAQYDTVRQLTAEEKEKLSVSSVDDLVDQGLMSDRAVGNNTYNPADFETSYIAIDYMTGIYGGGKNSVGSPGALMFKHNTFRMWGYYGFEEGVLGYASNKFKQASRDEGHAGLSDNFIISKISKGEFLTMEAFKKGYFKKVVEELKTKGIRPVTINQKTYSTFEELQEGFKQAVERDLKKNQLDERETRNFKFQVFRQLLQQTDSFKTSIFR

SEQ ID NO: 1295 - protein, 508 aa, Streptococcus pneumoniae
MKSKIVLGASLAIATLSLVSLVEIEGLSPFLIENVSANTHSANKVINHKVSIYLENADEGKGLTVNFSTDSVSPNLFDEFEKKSGITITTMLVNAKTGEVVEKRLTPSVFLRSNDLTSGTISSFIFSEYPDGEYKYVVSKGDFIDPKTQFKHQYRGESPVFRIRNRKYVELGTTDKKLDERRDNSVYKDGVVEHKVNLSLTSYQGGNGVTAIFSTDSVNSNLLNSFGEKAKKVLIRSKLINVKTGEVIDETFSPKVSLTSKILKSGSTAVFYFIDLTDGEYKYVAYESQQYTDPQTTLTHQYRGESPIFSIKDGKFSGLVSASKPDENPKPTPKPDEKPKPSAPQQEKTKPTVQSGWVGSSYYQNGKKVTSKWIFDKKYNSYFYLDASGNYVQNAWVGNYYLKSGGYMAKSEWIYDKNYGSYYYLTSEGSYARNTWSGNYYLKSNGKMAKSEWVYDSNYKSYYYLTSEGSYARNTWVGNYYLKSNGKMAVNERTPDGYRVDGSGKWVK

SEQ ID NO: 1296 - protein, 47 aa, Streptococcus pneumoniae
MSACTVCAEKGRTPDLSIVDNVPIVENAKAHENNFFYSSDITYYPIF

SEQ ID NO: 1297 - protein, 261 aa, Streptococcus pneumoniae
MAKYYIILPKDAEIYKTWRGTVNIPIIDATKTTPELSYFKEDHRNYIANENKSGANYIEWKGTVEEFKEAIKKLTDKKSTTATPKKDEKPTPKPDEKPKPTPTVQSGWVGSSYYQDGKKVISKWIFDKKYNSYFYLDASGNYVQNAWVGNYYLKSGGYMAKGEWVYDATYQAWYYLTSDGSYAYSTWQGNYYLKSDGKMAVNEWVDGGRYYVGADGVWKEGQASTASSSNDSNSEYSAALGKAKSYNSLFHMSKKNVCIDN

SEQ ID NO: 1298 - protein, 38 aa, Streptococcus pneumoniae; identical to SEQ ID NO: 193

SEQ ID NO: 1299 - protein, 243 aa, Streptococcus pneumoniae
MKSKKGGELRIAVFGDKKPFGYVDNDGSYQGYDIELGNQLAKDLGVKVKYISVDAANRAEYLISNKVDITLANFTVTDERKKQVDFALPYMKVSLGVVSPKTGLITDVKQLEGKTLIVTKGTTAETYFEKNHPEIKLQKYDQYSDSYQALLDGRGDAFSTDNTEVLAWALENKGFEVGITSLGDPDTIAAAVQKGNQELLDFINKDIEKLGKENFFHKAYEKTLHPTYGDAAKADDLVVEGGH

SEQ ID NO: 1300 - protein, 50 aa, Streptococcus pneumoniae
MKLFKPLLTVLALAFALIFITACSSGGNAGSSSGKTTAKARTIDEIKKRR

SEQ ID NO: 1301 - protein, 137 aa, Streptococcus pneumoniae
MYQDEAGFGRISKLGSCWAPIGVGPHVHSHYIREFHYCYGAVDAHTGESFFLIAGGCNTEWMNAFLEELSQAYPDDYLLLVMDNAIWHKSSTLKIPTNIGFTFIPPYTPEMNPLNKCGKRFVNVDLRIRPFELWKMS

SEQ ID NO: 1302 - protein, 38 aa, Streptococcus pneumoniae
MVTATTCFLKERVEFELLIFFYISPNRCLITVYSVLNL

SEQ ID NO: 1303 - protein, 93 aa, Streptococcus pneumoniae
MDTPDENGYVADDYRITYLEAHIKAMRDAIYKDGVDLLGYTTWGCIDSVSAGTGEMNKRYGFIYVDRDNVGNGTLKCSKKKSFYWYMSFIAMV

SEQ ID NO: 1304 - protein, 41 aa, Streptococcus pneumoniae; identical to SEQ ID NO: 737

SEQ ID NO: 1305 - protein, 56 aa, Streptococcus pneumoniae
MFSLNFFDDSVFLSIKIAHKGCFQLLDMTNPNFFNKFFLAQASDQLLHFLSWNIEL

SEQ ID NO: 1306 - protein, 325 aa, Streptococcus pneumoniae
MTEPDFWNDNIAAQKTSQELNELKNTYNTFHKMEELQDEVEILLDFLAEDESVHDELVAQLAELDKIMTSYEMTLLLSEPYDHNNAILEIHPGSGGTEAQDWGDMLLRMYTRYGNAKGFKVEVLDYQAGDEAGIKSVTLSFEGPNAYGLLKSEMGVHRLVRISPFDSAKRRHTSFTSVEVMPELDDTIEVEIREDDIKMDTFRSGGAGGQNVNKVSTGVRLTHIPTGIVVQSTVDRTQYGNRDRAMKMLQAKLYQMEQDKKAAEVDSLKGEKKEITWGSQIRSYVFTPYTMVKDHRTSFEVAQVDKVMDGDLDGFIDAYLKWRIS

SEQ ID NO: 1307 - protein, 38 aa, Streptococcus pneumoniae
MLQSNQVQNFHHSSFDITAIFPDYFHSVSNIFIDSFLW

SEQ ID NO: 1308 - protein, 112 aa, Streptococcus pneumoniae; identical to SEQ ID NO: 197

SEQ ID NO: 1309 - protein, 660 aa, Streptococcus pneumoniae
MKLKLCIIGFFFCLIATIGLVTISDTEIPIPLPIDGAFSIQGKSNLSNNEIYEMVRDLSKTEKVTIYKPIVQSSGQLKYVNFDDVNNEQLKSAPIVGMYYTLGKMDVDSLKPLTMTGLQTVYMAYPWYIGGILQFTGTLRILLMGSIYLTLLVVLFVVRTRQIKEGVIRRSLGLPIYDLRREYGISLIFELIMMALLMISYSSFLGNGFFTYSSKLFFSLLLTNFILFQIIDLITFVLFWLTIQIEKPIEIIKNKAKNKLIFVVWLAIISIIILVSGVFLQETKSSQSSINIQIQNLVPWDTVKDWRRIEFLGIESNSTKNREVNDSDGQYLQIVAALKNLDFLYIERSSAYVPDFMKTSHVIENFSKQLENDGITNPEINKELIYINQTGANLQNKVNGTNYHLLDNKIATIYIPEKWKENQKSIENTVVAEQFIGTNYTREQLAVQIIPDGEKIFYFNEDADNNLKMKDILPLANVADSKDNIVVVLDTDKMMENNKFSLASNILYKSLFSPEAVKKINEMTVLLNFSMNPVDVYQIVKLKIQSLEHQILLSQILQKIIYSIVFILIYQYVQLFITLKQNEYVKKIILGLSKTYIAISSLKYFMMTITMVILFTFLMTGQIELLYIGAASLLVLMLSIIMSFRKLSESYTKILKGDES

SEQ ID NO: 1310 - protein, 207 aa, Streptococcus pneumoniae
MTIDLLNVSKSFGSKKIFTDLNLIFESGKSYALIGGSGSGKSTLLNIIGRLEKIDSGNVLVDKQDIWKIKERTFFKNTVGYVFQNYSLIDNKTVYDNLSLITKDKKTITDVLEKVGLSSDYLHQKIYELSGGQAQRVAIARMLMKPRKIILADEPTGALDGEIGKEIIRLLLNETAEDKYVIIATHDPAVYNEVDVIIDMKDIGYKV

SEQ ID NO: 1311 - protein, 166 aa, Streptococcus pneumoniae
MKKKIYIALIFVTGVLAIFFFGKQMITKENINKPTVELTIYTLSSSDTEKWNKVRQVETEEAIYFITVKEVSSSEEVFSNIIANGAATGFGVREEEVKKFNNGLGDTIEDSKHNKLIEIEFFTFSDDGAGFVVANFDYGKEELNSQKKDIKELYKKIYESFKEKNK

SEQ ID NO: 1312 - protein, 47 aa, Streptococcus pneumoniae
MKIKEQTRKLAAGCSKHSFEVVDETDEVSSKHSFEVVDETDEVSNHT

SEQ ID NO: 1313 - protein, 242 aa, Streptococcus pneumoniae; identical to SEQ ID NO: 198

SEQ ID NO: 1314 - protein, 279 aa, Streptococcus pneumoniae
MKVIDQALLEKVIIERSRTSHKGDYGRLLFLGGTYPYGGAIIMAALAAVKSGAGLVTVGTDRENIPALHSHLPEAMAFSLQDQQLLKEQLEKAEVVLLGPGLRDDAFGEDLVKQVFAGLRQNQILIVDGGALTILARTSLSFSSSQLILTPHQKEWEKLSGITIEKQKEDATASALTSFPQGTILVEKGSATRIWQAGQSDYYQLQVGGPYQATGGMGDTLAGMIAGFAGQFKQASLYERVAVATHLHSAIAQELAQEQYVVLPTEISNCLPKVMKRYV

SEQ ID NO: 1315 - protein, 131 aa, Streptococcus pneumoniae
VLDSKEELKESENDAPKLETPLREEPRLAPQTLPEASEVLENKREESKVEITEPAQADDIRKVVGELAKDISITKLYMTGHSLGGYLAQIAAVEDYQKYPDFYNHVLRKVTTFSAPKVITSRTVWDAKNGF

SEQ ID NO: 1316 - protein, 55 aa, Streptococcus pneumoniae
MGRKPKKRPEERTELEHLQAENEYLRAENAILKKLRELRLKEEKEKEERQKLFKN

SEQ ID NO: 1317 - protein, 234 aa, Streptococcus pneumoniae; identical to SEQ ID NO: 205

SEQ ID NO: 1318 - protein, 37 aa, Streptococcus pneumoniae; identical to SEQ ID NO: 206

SEQ ID NO: 1319 - protein, 37 aa, Streptococcus pneumoniae
MRLSMKLIHDLDMHTTHSTAKMLYNMKAIKNDFSIRE

SEQ ID NO: 1320 - protein, 75 aa, Streptococcus pneumoniae; identical to SEQ ID NO: 208

SEQ ID NO: 1321 - protein, 142 aa, Streptococcus pneumoniae
MSNYRRTSKPKTEHIKKGFTVFQKTITTIGSILGLITAGITIMNALDNNNKNTKKEPTTSQTTTFVKEIQKESPQENTTPNKENNTSQEKTQQEETPKSSVKEEKKEDQKTATQDSTTPATSKPATENEKQPNTPTSENNTQ

SEQ ID NO: 1322 - protein, 274 aa, Streptococcus pneumoniae
MNQSYFYLKMKEHKLKVPYTGKERRVRILLPKDYEKDTDRSYPVVYFHDGQNVFNSKESFIGHSWKIIPAIKRNPDISRMIVVAIDNDGMGRMNEYAAWKFQESPIPEQQFGGKGVEYAEFVMEVVKPFIKHKTGWFDGMMTTGCSMGAYHALNFFLQHPDVFTKVIALSGVYDARFFVGDYYNDDAIYQNSPVDYIWNQNDGWFIDRYRQAEIVLCTGLGAWEQDGLPSFYKLKEAFDQKQIPAWFAEWGHDVAHDWEWWRKQMPYFLGNLYL

SEQ ID NO: 1323 - protein, 193 aa, Streptococcus pneumoniae
MSSIHTKNSSLKSKSRFNEMFGDPLNNNKKFAVKTGQQCFKFSSGKFLDKHDRVFEGYPAYGGNGIAWKSRKYLIDNPTIIIGRVGAYCGNVRTTHGKVWISDNAIYIKEFKNSDFNLVFLLELMKVIDFSKFADFSGQPKITQKPLENQKYILPPLALQNEFADFVALVDKSQFACEIAIKVWRNSLKFSII

SEQ ID NO: 1324 - protein, 42 aa, Streptococcus pneumoniae; identical to SEQ ID NO: 211

SEQ ID NO: 1325 - protein, 42 aa, Streptococcus pneumoniae
MSEYSGLSFFEVALAEFLDIVSAVYLEDADGIIVNLWGILDK

SEQ ID NO: 1326 - protein, 85 aa, Streptococcus pneumoniae; identical to SEQ ID NO: 778

SEQ ID NO: 1327 - protein, 61 aa, Streptococcus pneumoniae
VDKTDEVSSKHCFEVVDRTDEVSSKHCFEVVDRTDEVSSKHCFEVVDRTDEVSNRTTVRRS

SEQ ID NO: 1328 - protein, 39 aa, Streptococcus pneumoniae
MTEFMSDNFPKNLHTQFLINLGIKIQMPIFGEKSPTCRT

SEQ ID NO: 1329 - protein, 196 aa, Streptococcus pneumoniae
VVIGVASATTNIWIIFLSGFTAILAGAFSMAGGEYVSVSTPKDTEEAAVSREKLLLDQDRELAKKSLYAAYIQNGEFKTSAQLLTNKIFLKNPLKALVEEKYGIEYEEFTNPWHAAISSFVAFFLRSLPPMLSVTIFPSDYRIPATVLIVGVALLLTGYTSARLGKAPTKTAMIRNLAIGLLTMGVTFLLEQLFSI

SEQ ID NO: 1330 - protein, 144 aa, Streptococcus pneumoniae
MSFKNNWIDKEGRVFIYFTVEEIMKRRNISKPTAIKTLDELDIKKGIGLIERVRLGLGKPNIIYVKDFMSIFQVKENDLQKSKNLTSEVKDFNLRSKENELQEVKNLDSNYIENNKSKYSKREYSFGENGLGTFQNVFLAAEDI

SEQ ID NO: 1331 - protein, 75 aa, Streptococcus pneumoniae; identical to SEQ ID NO: 220

SEQ ID NO: 1332 - protein, 59 aa, Streptococcus pneumoniae; identical to SEQ ID NO: 221

SEQ ID NO: 1333 - protein, 91 aa, Streptococcus pneumoniae; identical to SEQ ID NO: 222

SEQ ID NO: 1334 - protein, 76 aa, Streptococcus pneumoniae
VFFIDGFIVRCHTVSCFDNATLVNSNVNDTEPGRICLTISSVTNSGAFAPGMRMAPITTSASLTLASMLNELDIRV

SEQ ID NO: 1335 - protein, 46 aa, Streptococcus pneumoniae
LSTKTKGDAGSMCTDDTITDDSYFSFGTPGTPPGRTPEPPACLVRK

SEQ ID NO: 1336 - protein, 141 aa, Streptococcus pneumoniae
MLIGIPKEIKNNENRVALTPAGVHSLVSRGHRVLIETNAGLGSGFTDADYQKQGAEIVATAGEAWAAELVVKVKEPLNSEYGYLRDDLLLFTYLHMAAAPELADAMLAAKTTGIAYETVRDNQGQLPLLVPMSEVAGRMAV

SEQ ID NO: 1337 - protein, 41 aa, Streptococcus pneumoniae
MASRNVLSMEPKFLLAGHFKGQFLILKIVSSDIDDGFAIAC

SEQ ID NO: 1338 - protein, 86 aa, Streptococcus pneumoniae
LSSADKTCLNQFFTDFSDFFQSSLVEDGFYTFQIENSGFGFFNQISQVFDSFFEFLIPFKIALGILVGSQSLIKRNHDRLVGIVVV

SEQ ID NO: 1339 - protein, 102 aa, Streptococcus pneumoniae
VSVFLKFIFNTTNQFTGLLFDAVALSLILIVGVQQIRKICKRLSHLICKRNWTEGSLSQAWLGFLIEKISESGKFFTNQYPFQFICSIASQTLKEALKIFCC

SEQ ID NO: 1340 - protein, 94 aa, Streptococcus pneumoniae
MVSNLVFIGNCNFHNTVIFHLLNRLNQGPLQILSQNHDKGRRLSWIFKSRLGQLNASKNWMGRKEQAMALAIAADLQDQLLFKRLIDFLDATIH

SEQ ID NO: 1341 - protein, 46 aa, Streptococcus pneumoniae
LLYNPVEKTRVHIKKGIGKLQYLFTRLFYLIFVSTDYISYGSSSEG

SEQ ID NO: 1342 - protein, 43 aa, Streptococcus pneumoniae
MRSYITLICNLNNNLFCLNSFFLTNLVWSQIFSLLSVFITVYI

SEQ ID NO: 1343 - protein, 189 aa, Streptococcus pneumoniae
LLEITLKSPYQFAHILFQSTIVPHGGHYHFIPESDLSAGELAATYVFNPNDIVRDTGDAYIVRHGDHYHYIPKSSLNNPPSHSNTEEVGSSSSSVLSNPSLHVHHEEEDGHGFDANRIISEDSEGFVIPHGDHNHYIKVQTKGYEAALKNKIPSLQSNYQPGTFDEKAVLAKVDQLLADSRSIYKDRLS

SEQ ID NO: 1344 - protein, 81 aa, Streptococcus pneumoniae; identical to SEQ ID NO: 230

SEQ ID NO: 1345 - protein, 579 aa, Streptococcus pneumoniae
MELSAIYHGPESEYAYLYKDKKLHIRIRTKKGDIESINLHYGDPFIFMEEFYQDTKEMVKITSGTLFDHWQVEVSVDFARIQYLFELRDTEGQNILYGDKGCVENSLENLHAIGNGFKLPYLHEIDACKVPDWVSNTVWYQIFPERFANGNALLNPEGTLDWDSSVTPKSDDFFGGDLQGIIDHMDYLQDLGITGLYLCPIFESTSNHKYNTTDYFEIDRHFGDKETFRELVDQAHHRGMKVMLDAVFNHIASQSLQWKNVVKNGEQSAYKDWFHIQQFPVTTEKLVNKRDLPYHVFGFEDYMPKLNTANPEVKNYLLKVATYWIEEFNIDAWRLDVANEIDHQFWKDFRKAVLAKNPDLYILGEVWHTSQPWLNGDEFHAVMNYPLSDSIKDYFLRGIKKTDQFIDEINGESMYYKQQISEVMFNLLDSHDTERILWTANEDVQLVKSALAFLFLQKGTPCIYYGTELALTGGPDPDCRRCMPWERVSSDNDMLNFMKRLIKIRKYASVIISHGKYSLQEINSDLVALEWKYEGRILKAIFNQSTEDYLLEKEAVALASNCQELDNQLVISPDGFMIF

SEQ ID NO: 1346 - protein, 119 aa, Streptococcus pneumoniae
MGQEIKLIRKQFRITRQEEKQIKEMMREQKVDSFSEFLRQNLLKKNYQDRIFESWFSLWQSQKFEQISRDVYEVLVVARENHQVTQEHVSILLTCVQELIAEVNQVQPLSREFREKYMG

SEQ ID NO: 1347 - protein, 109 aa, Streptococcus pneumoniae
MVYRYRTNLKKVFLTDPELHQLNERIAKSNCQNFSVYARKVLLNPNMSFVTINTDTYDQLVFELRRIGNNINQIARAINQSHLISQDQLQELSKGVGELIKEVDKEFQV

SEQ ID NO: 1348 - protein, 205 aa, Streptococcus pneumoniae
MVVTKHFATHGKKYRRRLIKYILNPDKTDNLKLVSDFGMSNYLDFPSHTEMVEMYNVNFTNNDKLYESRNDRQEKHQQTIHAHHLIQSFSPEDNLTPEEINRIGYETMMELTGGRFKFIVATHTDKDHVHNHILINAIDRNSDKKLIWNYALERNLRMISDRISKMAGAKIIEKRYSYRGYKKYRESSHKFELKQRLYFLMQQSK

SEQ ID NO: 1349 - protein, 171 aa, Streptococcus pneumoniae
MMTDRAMTKPIRGRQLSKRDLYDEEFFRTHFAKQEIESRLEFLLNRVNSLEELITKAKELNLTIDLKQKNVTFILKENNQKISLGHQKISDKKLYDVKFFQDYFKNKEVIASEGLENLQEQYHAFQEERDKDKVSTEEIEEAFKTFKKPLRHLRKNEIPFVNLKWNLQRTK

SEQ ID NO: 1350 - protein, 195 aa, Streptococcus pneumoniae
MEEENHKKYKVYIRETSSYFVYNKENMDNNCFIKGRTLIRQLSNDSQKLPYRRPTLKSLQEKISEINLMIELSNTNKQYQEIKDELVLEIAEIDMKLEETQEKIATLNKMAEVFINLKSEDEIGRKLAKYDFDQMNMTESIMLDRLNTDILKLQQELGNEINKYEEIARRLDLFVKIINTNKFTVLKFHENALLE

SEQ ID NO: 1351 - protein, 283 aa, Streptococcus pneumoniae
MKSKLGITLRKVRKGKQISLCSVADEHLSKSQISRFERGESEISCIRLINILDKLHITLDEFLVLHNDDYTSSESFANLVQYIRKQYSSQSINNIACLLSDTSDYTLNSFEKTMVKSILHTMDSNIIPSDEELLHLTDYLFKIEKWGYYEIILLGNCVRTINYNSYFLLTKEMLNNYIYSSLNKTNKQIVSQLAINCFILSIDKEEFSNCSYLISKIKTLLDNELNFYEQTVFLYATGYYEFKRQLSSGIETMKQAIQVLDILGEDKLKLHYTSHFDKLVNNK

SEQ ID NO: 1352 - protein, 182 aa, Streptococcus pneumoniae
MSLSYYYEINPSTDILKCIEELLYKEDKCFNNILKNWKDIRRNHNDSFPNFWCYGAPGILLARKEIFDKTNIGNNDLSIIKNVLTNVEKIRELNLCHGSVGTISCLDAILKDEENLLIKESIDFYFDNVVSQVIKPELSTDLNTMNTFSFMLGVSGVVYEISRKQDDRLLNVLLLELRGHDD

SEQ ID NO: 1353 - protein, 708 aa, Streptococcus pneumoniae
MMTRKVPNIEQMSQIECGLCCCLSILHFYKSKETLLDLRRDIEKGRDGYSIGDLKQLLNKRNFDTGSYQVKDVNKISELPLPLIAFWDNQHYVVIYKVKKNKVYIMDPSKGYINYEFKEFSKHFSNIVLLSFPNENYQSLKSQFPSPWIRVFSSFSKVKGRLILTLLFSIISYLIILSVPVMTSKFINSALGNTFSFQTSFLILFSLLCLYLISILARSMGILFSNIFFSRDIESFTFKHLLKLPYSFFELRAKGDILYRISSLSGFRELFTNQVVGGVVDIGTILSVVIYMFLSSKTLSIIALILSLINFLFLFSTRKIMYDTVNRELQEQSLIYSVETEALNTISSIKISGLEDEIYENWSKYLKNVLTKYKKRSIVHILYNSATNVFQLFAPIIILIFGLDNVLNGKILLGEVVAFQTMASILFSSEISIFNAYTQYILAAGYLNRVNDIWLENEENVENGLKKCSLEGRIDIKDLSFSYSKDSAPVIENLNLTIEPGQRIALVGQSGSGKSTLSKILSGLYKIDTGKILFDGVNINQIDKKILSQNLGVVPQDSFLLNRSILDNITLKNEVTSQKIEEVCKAVQIYDEIMAMPMKFNTIISEMGSNISGGQRQRIALARALINNPSIVILDEATSALDTINEERITKYIQSQGCTQIIIAHRLSTIKDADIIFVMKGGKIVESGNHKYLMDLGGEYYSLYTKRK

SEQ ID NO: 1354 - protein, 242 aa, Streptococcus pneumoniae
MAIVEIINLTKSFKDIEVIHNTSFYLNKGKVYGFVGPNGAGKTTIIKMILGILKPDSGKITIFNQTVEQNSENILSRIGLVLGPSFYGHLDAYKNLKLIANMKGLSLDTERLNEYLSMVGLKDVKKKKVKNFSMGMKQRLSIAASLLGSPEILIWDEPINGLDPQGVIEIRSLIRFLQEKKGITFLISSHILSELDKVISDIIIINYGKVEFFGSCHYLLQKYNCRNLEEAYLACLAGGEYD

SEQ ID NO: 1355 - protein, 245 aa, Streptococcus pneumoniae
MIKLEFLKQKKSILWFVLIFPIILNVLLYIDLTFRYRGYLLVHQNELALSNWQLIFKEQTIFYFSELFYLVLSLIIYEVFAVEFKNDAWLTVISLPFRNKYTINSKLLITVVYTFTFWLSDYISLYVIGKAIDNSLEIGLIFFLKTFTIQLISSLMIMLLYFLTLVLIRKISGIIPIGIIMMILTISIYYNDYNFKIYLPFTYLSHAFRVTESQFYMILLSNIIIIVLFYILIRKLNERSFEMKL

SEQ ID NO: 1356 - protein, 236 aa, Streptococcus pneumoniae
MKLLKNELIKSKIFLFIIVDICIQILVILAIKTYILDISALYSELDYNKYWYILHTLIYMLMIFPIQILYQNLREALIEDNNNGWNIMVINTNNLVKIIYIKVTINIVRCFICYFVYTIFSLIQLGGMGTDMLLTNIIFPNIMSFLLFLPIAIFMQICCIRFDSILAKALPNILLILIVLITFQSDWNIFIPATYYYTEIQSTTNLGIKLLVCIWIMGFEFFLLPKLIKLKEQNLV

SEQ ID NO: 1357 - protein, 180 aa, Streptococcus pneumoniae
MRFSAFKIFSNSVCKRIITKGLGFRALLLYTISKVKLREDILVSQSIVPVEIPQYCRFDSKKRNGILFNVRIANLKFTFFRLDFLRNKIWYSSSMNDEASKQLTDARFKRLVGVQRTTFEEMLAVLKTAYQLKHAKGGRKPKLSLEDLLMATLQYVREYRTYEEIAAVFGIHESNLIRRS

SEQ ID NO: 1358 - protein, 69 aa, Streptococcus pneumoniae
MHTKSRTIKSLITQFTAILLYELPLALDSLVFMGFSMKLIHDLNTHTTHSTAKMLHNVKAIKNDFSIRE

SEQ ID NO: 1359 - protein, 49 aa, Streptococcus pneumoniae
MIKIYFTKFSENHNPFCKIFEIIFTNLIFQSILNKNKKNPLRQGEANVV

SEQ ID NO: 1360 - protein, 123 aa, Streptococcus pneumoniae; identical to SEQ ID NO: 265

SEQ ID NO: 1361 - protein, 41 aa, Streptococcus pneumoniae; identical to SEQ ID NO: 266

SEQ ID NO: 1362 - protein, 46 aa, Streptococcus pneumoniae; identical to SEQ ID NO: 267

SEQ ID NO: 1363 - protein, 2159 aa, Streptococcus pneumoniae
MEKYFGEKQERFSFRKLSVGLVSATISSLFFMSVLASSSVDAQETAGVHYKYVADSELSSEEKKQLVYDIPTYVENDDETYYLVYKLNSQNQLAELPNTGSKNERQALVAGASLAALGILIFAVSKKKVKNKTVLHLVLVAGMGNGVLVSVHALENHLLLNYNTDYELTSGEKLPIPKEISGYTYIGYIKEGKTTSDFEVSNQEKSAATPTKQQKVDYNVTPNFVDHPSTVQAIQEQTPVSSTKPTEVQVVEKPFSTELINPRKEEKQSSDSQEQLAEHKNLETKKEEKISPKEKTGVNTLNPQDEVLSGQLNKPELLYRDETIETKIDFQEEIQENPDLAEGTVRVKQEGALGKKVEIVRIFSVNNEEVSREIISTSTTAPVSRIVEKGTKKAQVIKEQAETGAEHKEVQSGAIVEPAIQPELPAAVLTDKGESAVQPELPEAVVSDKGVPEVQPALPEAVMTDKGDPEQVEPLPEYTGVQAGAIVEPEKVEPEYAGVQAGAIVEPEQVAPLPEYTGVQAGAIVEPEKVEAPKEYTGVQAGAIVEPEKVEAPKEYTGVQAGAIVEPEKVEPSKEYTGVQAGAIVEPEQIAPLPEYTGVQAGAIVEPEKVEALKEYTGKIEQPSAEDTKPNNENTNTPEEMSIQKKSSALINMNFITDSSKVTGVGSATFIAPNVLLTVAHNFINNSTDNTTGEFRGDKSKNVYEWVTPDGQKGTFTANNIHFYNKKDYPKGFIYDLAVIKLPETTGREHVELVKNYSKVNLNDKLNVHGYPAGKYTHLKDATVEMEQEYANNTYGVQYQGGNPGMSGGGIFNANGEVIGVHQNGAQNRSGGLILSPTQLAWIKSIIAGNEIPPVYDELYRHKDEKKDDAKDEKEVIKKLELRNISSVELYSKDGNKYRHVTSLASLPSNAENYFMKVKSENFKDVMLPVTSITNDTKDNRDVYKIVASANSLIQHENNNVLENYTYYLPKTQQSETGVYTSFKNLVDAMNSNPNGTFRLGATMDAREVELPDGQESYVNNVFHGILVGTNNEKYYAIYNLKKPLFGELNGATVEKLSLKDVNISAKDDTATLAKEANNNTHIDNVHADGAIAGERSIGGLVSQVNNSTISNSSYTGRITNTYKTVASYQIGGLVGKLSGPRGLIDKSFASIDLSSNATQGDQSIGGIVGAVENSALISNSYAEGNLNNVQRFANVGGVVGNLWDPVGGLEKSGRLSNVLSDVNVTNGNAIAGYNFNGIKANGTYSNKNNKVVNVVQEDDEILTKDSTVQRGEVLEDAQIKEKKATFVSKNTIKTEDFNFSSRYVTDYKNLENADSSKEKVYKNIEKLLPFYNRETIVKYGNLVETSSNLYNKELLSVVPMKDKEVISDINKNKSSINKLLLYYADNTSETLNVNYQTDFSNVAEYRIGGTNLIYTPNTLLRNYQNILDEVLPALNSVEYKSEAIRKVLDVSKDVSLTELYLEEQFNTTKTNLKDSLTKLLTADAAIAENNNKVIDNYVIEKIKNNKEALLLGLTYLERWYDFKYRDTKAKDLVMYHLDFFGKSNSSALDNVIELGKSGYNNLLAKNNVITYNVLLAKNYKTNNLFDALEKYRKAFVPDKTNNEWFKEQTKAYIVEEKSTIKEVSDKQSIAGSPYSIGVYDRLTSPSWKYPSMVLPLLTLPEKSVFIIANISTIGFGAYDRYRSKEHPAGTDLNDYVEKKAKEAAVRFRDHYDYWYRILDDKNKEKLYRSVLVYDAFRFGTDEKEDKDTYQATFETNHPAIKHFFGPAGNNVVHNSNGAYATGDAFYYMAYRMLDKDGAVTYTHEMTHNSDREIYLGGYGRRNGLGPEFYAKGLLQAPDHPNDPTVTINSILKYDQSEESTRLQVADPTQRFGSVDDLNKYMHNMFDVIYMLEILEGKAVAKLDTNQKYDLLRKIENEYKPDPDGNSVYATNVVRRLKPEELTKLTTFNSLIEHDIITRRGYVDEATYKRNGYYTINLFSPIYSALSSKIGTPGDLMGRRIAFELLAAKGYKDGMVPYISNQYEKEAKAQGKVITSYGKQIGLVTDEIVLSKVFNNQYNSWIDFKKDMYKEREDKFGKLNKVSFIDPNGSWARQQKVTIDNINRLEKMIEDAVKFDAEDEVAKLYPETNSRVLKLKKAIFKAYLDQTGDFRSSIFENKK

SEQ ID NO: 1364 - protein, 1653 aa, Streptococcus pneumoniae
MTALGLLAIGSLIVIITKDNRNKKIATFLIVGATGLVTLSTASALNLNANIHESGRDGVLQISGYRYVGYLELDDKTVSSVSPASTVSPVEQPKVVTEKGEPEVHEKPDYTQPIGANLVEPEVHEKLAYTEPVGTTGVDENGNLIEPPVNDIPEYTEPVGTTGVDENGNLIEPPVSDIPEYTEPISTVSEVASEREELPSLHTDIRTETIPKTTIEESDPSKFIGDDSVRQVGEDGERQIVTSYEELHGKKISDPVETVTILKEMKPKILVKGTKEKPKEKTAPVLTLDRTNTNVLNRSATLSYHLVNTDGVTINKITATIKDGNEIVKTVDLTSEQLDKQVEDLKFYKDYKIETTMTYDRGKGEETATLEEKPLRLDLKKVEIKNIASTNLVKVNDDGTETPSDFMTEKPSDEDVKKMYLKITSRDNKVTRLAVDKIEEVTEEGKKLYKITAEAQDLIQHTDPTKVRNKYVHYIEKPVPKVDDVYYNFKELVDAMNADKNGTFKIGADLNATNVPTPNKQYVPGTFKGHLSSVDGKQYTIHNIARPLFDRVENGSVKNINLGNVDINMPWADGIAPVANMVKNATVEDVKVTGNVVANNNIAGIVNKIDSGGQLTNVAFIGNLTGVGDKGQYMAGIAGEIWRGNLAKAYVEADIVANRARIGGLVAKTDNGNDSMGIGKYGSIRKSVTKGTIKTKVLFETGGFINSNLPFGKLEDNISMMRVENGEEFFGSSDLDYDGGYFTNGWLERNFVVKGVSSGKHSYKRSRDKIKEISQDEANKRIANFGLTADKYEINEPVVNRLNRLTRREDEYKSTQDYKSERDLAYRNIEKLQPFYNKEWIVNQGNKLAEDSNLAKKEVLSVTGMKDGQFVTDLSDIDKIMVHYADGTKEEMDVTKNTDSKVQQVREYSVSGLGDVVYTPNMVVKNRDKLIADVKSQLSSVELISQEVRDLMSRRDKPAENTDERKNGYIKDLYLEESFAEVKQNLDKLVKSLVENEDHQLNGDEAAIKSLLKKVETNKAKIMMALTYLNRYYDIKYGDISIKNIMMFKPDFYGKTPSVIDRLINIGSSEKNLKGDRTQDAYREIIAGNTGKSNLRNFLEYNMRLFTEDKDINDWFIHSAKNVYVSEPKTTNTELKDKRHRVFDGLDNGVHGRMILPLLTLKDAHMFLISTYNTMAYSSFEKYGKHTEEARNEFKTKIDEVAHAQQTYLDFWSRLALPNVRDRLLKSQNMVPTPVWDNQTYNGSPVGRRGFDSKGNPIAPIRELYGPTWRHHDRDWRMGAMASIFPNPNNDDKVLFMVTDMISPFGISAFTHETTHVNDRMLYFGGHKHRQGTDVEAYAQGMLQTPDSSTTNGEYGALGINMAYHRPNDGNQWYNPDPDKLKTRDDIDRYMRNYNEAMMLLDHVEADAVLPKIKGDNSKWFKKIDKEMRSKIQYNDLLGPNQWDSIRDLKDEEKVMTLSSVNDLVDNNFMTKHGNPGNGRYRPEDFTPNSAYVNVNMMAGIYGGNTSQGAPGSLSFKHNAFRMWGYYGYENGFISYVSNKYKAEADKNNHGLLSDKLIINKVSKGNFNTLEEWKRHWYGEVLAKAKKGFEAIDIDGVHISNYDELRPLFDKAVEEDLKKPDDFSHTVALKSKVFKALLKNTDGFFNKLFKEDI

SEQ ID NO: 1365 - protein, 162 aa, Streptococcus pneumoniae
VFHKSLNNCKRKKVCYSSLLPSCFHDWLKNLLTKSQHFSHINFIVEGEGWRSQVRFNHALGNNLTHWCHWNTLDFTIWCYVIRDFFHFFNLSRRFDAIVFDIFRKQGQNILLHDFTTMTGSLDFLPSNVMFEGNSFCKWRNANHVCVFISFHVFFVDTTVCT

SEQ ID NO: 1366 - protein, 145 aa, Streptococcus pneumoniae
VLGGRANSVTSCTTNSHWNLTFTTKHVTCFSSLVDDIVHGNNREVHEGHIDDWTKSCHGCSCCCSRDGSFRNRTVTDTFWTKFFKHSNRSTEVSSEDTDIFSHQEHIFIATHFLRHSKDNGVTEGHCFCFHFISFSLVCVNIFKG

SEQ ID NO: 1367 - protein, 129 aa, Streptococcus pneumoniae
MDMFYIGHFLDIRRDTVTVVNAIENDWQVPDRSHVHCFVENTFIGRTISKEANNDFTGILHLLTEGCTDSDPHTTTYDTIGTKVPSIKVSDMHRSTFPFTGSSVFTKDFSHHSVEVNPFSNSLPVSTVV

SEQ ID NO: 1368 - protein, 78 aa, Streptococcus pneumoniae
MISVWHCNTSSCSTCDLRWVENKAIRFHMALTQRQFVELFQETINVITLTCLTVSVAVVACVSICSSWIAYRRYPVCS

SEQ ID NO: 1369 - protein, 99 aa, Streptococcus pneumoniae
MISMRNDISITSILYDIRSIKDITIICSIASLRTCQGNSSIVSWSPSFTILTMFLFLSIDFLFCTDVIRVGSILKVNIVFSIYLDNISTLDLINNILIF

SEQ ID NO: 1370 - protein, 59 aa, Streptococcus pneumoniae
LVCYLDDDLLSIDSFTLANLIRSQILRFLRRLFSIYIGNTIIFLNRSSLIQSQLVRTNT

SEQ ID NO: 1371 - protein, 564 aa, Streptococcus pneumoniae
MDKLIIFIEKGKPFFEKLSRNIYLRAIKDGFISSMPAVLFSSIFILIAAVPNIFGFKWSDEQLAFILKPYNYSMGILALLVAGTTAKSLTDSVNTRSMEKTNQINYMSTFLAAVVGLLILAADPIEGGFANGLLGTRGLLTAFLAAFITVNIYKVCIKNNVTIRLPEEVPPNIAQVFKDVIPFALSVLSIYGLDLIVRNIFGTNVAESVGKILAPLFSATDGYIGLAIVFGAYAFFWFVGIHGPSVVEPLIVAISYANIEANVQLVQAGMHADKILNPVTQTFVVTMGGTGATLVVPFMFMWLCKSKRNRIVGRASVVPTFFGVNEPILFGAPIVLNPIFFIPFVTAPIINVWIMKFFVDVLQMNSFSIILPWTTPAPIGIVMGTALAPLSFVLAITLIIIDTLIYYPFVKVYDHQILEEERKGNSSSELKEKVAANFNTAKADAILEKAGVDAAQNTITEETNVLVLCAGGGTSGLLANALNKAAAEYNVPVKAAAGGYGAHREMLPEFNLVILAPQVASNFEDMKAETDKLGIKLAKTEGAQYIKLTRDGKGALAFVQEQFD

SEQ ID NO: 1372 - protein, 39 aa, Streptococcus pneumoniae
MIFSNQIPLLLSECNPLTNYNHLFSLIISDKRDIVIHWI

SEQ ID NO: 1373 - protein, 162 aa, Streptococcus pneumoniae
MDGFIVTVKIIGHLLVVVFSAIPFFKEFCKEVCVCLLSIVTFKVFNFRNQFLVFFRWFVFSMNESFDDITHKQFTSNLTTKADNVSVQLFFSIKGCCHITNQGRTNTWNFIYSVVDTNTSTTDTYPKISLAASYSFPYFFTKDWVVSPCMVICTKVNDFISF

SEQ ID NO: 1374 - protein, 114 aa, Streptococcus pneumoniae; identical to SEQ ID NO: 273

SEQ ID NO: 1375 - protein, 69 aa, Streptococcus pneumoniae
MKLFKMSCRNIGQAGKILADSGYQGLMKIYPQAQTPRKSSKLKPLTAEDKACNHALSKGEARLRTSLPK

SEQ ID NO: 1376 - protein, 49 aa, Streptococcus pneumoniae
MRRKYKSIALKKELANDSGKKKCHAMKAQAIVTSQGRIVSLDIAVNYLL

SEQ ID NO: 1377 - protein, 50 aa, Streptococcus pneumoniae
MKIKEQTRKLAAGYSKHNFEVVDETDEVSNHTYSKATLTWFEEIFEEYKN

SEQ ID NO: 1378 - protein, 78 aa, Streptococcus pneumoniae; identical to SEQ ID NO: 275

SEQ ID NO: 1379 - protein, 46 aa, Streptococcus pneumoniae; identical to SEQ ID NO: 276

SEQ ID NO: 1380 - protein, 55 aa, Streptococcus pneumoniae; identical to SEQ ID NO: 277

SEQ ID NO: 1381 - protein, 103 aa, Streptococcus pneumoniae
MPHTRDNWQTRFKNSSYHNFFVKGPEILNRTTSTTNNEQIQIVPLISTRNISSNFLRSPFTLNLGRIKKDVNTWESPADGRDNISNNGSTTAGYYPNSLRKLG

SEQ ID NO: 1382 - protein, 63 aa, Streptococcus pneumoniae
LLEAFLKQAFFCQFFLKLFKLNRKRPNPIRLSFFNDDGVATTWFIDLYTPNHIDLHSFFQVKP

SEQ ID NO: 1383 - protein, 91 aa, Streptococcus pneumoniae
MFMSNLCQFFQVWNINQGVTQGFNQDKLGIVFDSCFYFLQIINIDKGCCDTITRKGFFQKIEGSTVNSRSSHYMVTSMGKRQNRISHCSHT

SEQ ID NO: 1384 - protein, 236 aa, Streptococcus pneumoniae
LINVFSHGVDIAIHSATKFIGGHGTTIGGIIVDSGRFDWMASGKFPQFVDEGSSCHNLSYTRDVGAVAFIIAVRVQLLRDTGAALSPFNAFLLLQRLETLSLRVERHVQNAETIVDFLVNHPKVEKVNYPKLADSPYYALAEKYLPKGVGSIFTFHVKGDEEEARKVIDNLEIFSDLANAADAKSLVVHPATITHGQLSEKDLEAAGVTPNQIHLSIGLENVEDLIEDLRLALEKI

SEQ ID NO: 1385 - protein, 40 aa, Streptococcus pneumoniae
MTRDFKFETLQLHAGQVVTPATKSRAVPIYQTTSFVFDDT

SEQ ID NO: 1386 - protein, 247 aa, Streptococcus pneumoniae
MSQKNNKKKNKRKNLLTNILAGFLILLSLALIFNTQIRNIFIVWNTNKYQVSQVSKEKLEENQDTEGNFDFDSVKAISSEAVLTSQWDAQKLPVIGGIAIPELEMNLPIFKGLDNVNLFYGAGTMKREQVMGEGNYSLASHHIFGVDNANKMLFSPLDNAKNGMKIYLTDKNKVYTYEIREVKRVTPDRVDEVDDRDGVNEITLVTCEDLAATERIIVKGDLKETKDYSQTSDEILTAFNQPYKQFY

SEQ ID NO: 1387 - protein, 144 aa, Streptococcus pneumoniae; identical to SEQ ID NO: 283

SEQ ID NO: 1388 - protein, 257 aa, Streptococcus pneumoniae
LKKKWFFVDYYDTTIILLALISVILVLLGFAEMIDLDNPPYSIIDLVIWGVFVIDYSWRFFITKRKWRFILENIFDLLAILPLNAIFTVFRLGRIFRLAKLTKLLKLTRLLRIIGLTGKLERKISRFLRTNGLIYILYVNIFIVLVGSSILSVVEEKSFSDSLWWALVTVTTVGYGDIVPASIFGKWLAVLLMLVGIGTIGMLTSALTNFFVKDNPDEQIKLDKLQDELSSQRILLEKQSKKIEELHKMIQDLIEKT

SEQ ID NO: 1389 - protein, 80 aa, Streptococcus pneumoniae
VVDFKQTRQDPHDITIYSWLRQVKSNTGNGSCCVRSNPFQAGNSFIGIWKLATKVSHNLLGCSLHIANSRIIAQALPSFQ

SEQ ID NO: 1390 - protein, 180 aa, Streptococcus pneumoniae; identical to SEQ ID NO: 849

SEQ ID NO: 1391 - protein, 62 aa, Streptococcus pneumoniae
LRILDSQPCFFVDFTNDRLRKSLIIFYMTSRKGITRPAIVFRGAILHHHALSFEVFNQTNIG

SEQ ID NO: 1392 - protein, 188 aa, Streptococcus pneumoniae; identical to SEQ ID NO: 287

SEQ ID NO: 1393 - protein, 116 aa, Streptococcus pneumoniae; identical to SEQ ID NO: 288

SEQ ID NO: 1394 - protein, 75 aa, Streptococcus pneumoniae; identical to SEQ ID NO: 852

SEQ ID NO: 1395 - protein, 110 aa, Streptococcus pneumoniae; identical to SEQ ID NO: 853

SEQ ID NO: 1396 - protein, 122 aa, Streptococcus pneumoniae
MNITKTNFLAVNFVFTIPTTIDMAFYSDFLTCILDKSIMIIQSHNYRSIIKRFTTFCSSKDDIRHLAPTETLDTRLSQGPSQTFCNIRLSRSIGSNDCRHTLVKDDLGLISKRLESLNFDFL

SEQ ID NO: 1397 - protein, 89 aa, Streptococcus pneumoniae
MGFIVCNHLKFACFNLRNHDLIDKFLDLGHILVQKKGTKKGFKGITKNGITIAPTRFFFPLTQLDKLVKLAITRKASQTLLTDNHSTEF

SEQ ID NO: 1398 - protein, 412 aa, Streptococcus pneumoniae
MRITDNQHKIAKEDFVAEYPKLSQALLDRTLDNLSREDNIFIFPNDLTHTPDLDKDQKIFETVNQKIKTGNVIGFLGYGQERLTISSRFSDESNDHFLHYLLNKVLHINLTSLDVALSREERLYQLLMYLFPKYLQAAIRKGLYKEYHRFSHNDSHVKGVIDVRNHLKKNLPFTGNIAYTTREFTYDNPLMQLVRHTIECIKNQKSIGQGVLDNLSTSRENVSEIVRVTPSYKLADRAKIIRMNKIKLIRHAYFREYRKLQELCLVILSREKHGLGPQAQRVHGILFDVAWLWEEYVYTLLPKGFVHPRNKDKTDGISVFSVGKRKVYPDFYDRERKIVLDAKYKKLELTEKGINREDLFQLISYSYILKAEKAGLVFPSKDKVIDNEIGNLAGYGLFESLRMPHSIVHFVK

SEQ ID NO: 1399 - protein, 81 aa, Streptococcus pneumoniae
LDEDILLGCILPWKPEAFEKLKAYGNGREELMTDVRGTSCFVIKFGKAGEQLAAKLWEEGKMVYASSASMTKRLKLAMSKV

SEQ ID NO: 1400 - protein, 345 aa, Streptococcus pneumoniae
MAKKIVALVGDGIGPEIMEAGLEVLEALAEKTGFDYEIDRRPFGGADIDAAGPPLPDETLKASREADAILLAAIGSPQYDGAAVRPEQGLMALRKELNLYANIRPVKIFDSLKYLSPLKPERISGVDFVVVRELTGEIYFGDHILEERKARDINDYSYEEVERIIRKAFEIARNRRKIVTSIDKQNVLATSKLWRKVAEEVAQDFPDVTLEHQLVDSAAMLMITNPAKFDVIVTENLFGDILSDESSVLSGTLEVMPSASHSENGPSLYEPIHGSAPDIAGQGIANPTSMILSVAMMLRDSFGRYEDAERIKHAVETSLAAGILTRDIGGQASTKEMTEAIIARL

SEQ ID NO: 1401 - protein, 75 aa, Streptococcus pneumoniae
LANIESHCNFFQSSIFSSLPNTIDSPFNTSCTILDSSKAICHCHSEVIMTVRRTDDLTIRLDILNQVFEDGTIFL

SEQ ID NO: 1402 - protein, 52 aa, Streptococcus pneumoniae
MTAIWEIATSVEFTKTTKFNDHWTATHFTVKSSWFILNLDFFHFFFSLGNFF

SEQ ID NO: 1403 - protein, 65 aa, Streptococcus pneumoniae
MPRNRFSFTVRVTREKNFISFFSFFFQVIDKRAFSSDINILRFIIIFNIDGHTGFLQITDMPDTG

SEQ ID NO: 1404 - protein, 40 aa, Streptococcus pneumoniae; identical to SEQ ID NO: 298

SEQ ID NO: 1405 - protein, 85 aa, Streptococcus pneumoniae; identical to SEQ ID NO: 299

SEQ ID NO: 1406 - protein, 57 aa, Streptococcus pneumoniae; identical to SEQ ID NO: 300

SEQ ID NO: 1407 - protein, 84 aa, Streptococcus pneumoniae; identical to SEQ ID NO: 301

SEQ ID NO: 1408 - protein, 86 aa, Streptococcus pneumoniae; identical to SEQ ID NO: 302

SEQ ID NO: 1409 - protein, 39 aa, Streptococcus pneumoniae; identical to SEQ ID NO: 303

SEQ ID NO: 1410 - protein, 59 aa, Streptococcus pneumoniae
MAFVLHTEKHHDINLINDFINGYKLSIVCKLLTSPFLRSSEKEFSSQAFQNLHIGFGNA

SEQ ID NO: 1411 - protein, 69 aa, Streptococcus pneumoniae
VIQVTCNSNFKTLKVAKFLINGHQIKQALARVLARTISTIDDGSRNRWTSNQFSIVVDLWMANHTDIHS

SEQ ID NO: 1412 - protein, 56 aa, Streptococcus pneumoniae; identical to SEQ ID NO: 869

SEQ ID NO: 1413 - protein, 317 aa, Streptococcus pneumoniae; identical to SEQ ID NO: 1147

SEQ ID NO: 1414 - protein, 78 aa, Streptococcus pneumoniae; identical to SEQ ID NO: 872

SEQ ID NO: 1415 - protein, 74 aa, Streptococcus pneumoniae; identical to SEQ ID NO: 873

SEQ ID NO: 1416 - protein, 232 aa, Streptococcus pneumoniae
MKKEQFYPLGIFLAAMLGGLVRYLVSTWLPASPDFPWGTLFVNYLGIFCLIYLVKGYLVYKGTSKGLILALGTGFCGGLTTFSSLMLDTVKLLDTGRYPSLKPELAFEYRWRPAFSLLFGEEEMVIVYLAIACGLGALVRYFFSRYNQASKLPLGTLIANLLGCFLIGVFYNHVESKEVYAILATGFCGGLTTFSTLNDELQRLLSDKKVFYSYLTLTYIGGLVAIFLGILL

SEQ ID NO: 1417 - protein, 148 aa, Streptococcus pneumoniae
LNRSILDNITLKHEVTSQKIEEVCKAVQIYDEIMAMPMKFNTIISEMGSNISGGQRQRIALARALINNPSIVILDEATSALDTINEERITKYIQSQGCTQIIVAHRLSTIKDADVIFVMKGGKIVESGNHKYLITLGGEYYSLYTKRK

SEQ ID NO: 1418 - protein, 52 aa, Streptococcus pneumoniae
MSLLETAKRHQLNSEKYLSYLLECLPNEETLVNKEVLEAYLPWTKVVQEKCK

SEQ ID NO: 1419 - protein, 56 aa, Streptococcus pneumoniae
LKRPPKQADKSSLGAKGLAYCDQLFSLERDWEALPADERLQKRQEHLQPLMEDFFA

SEQ ID NO: 1420 - protein, 89 aa, Streptococcus pneumoniae
VISIEMRTFFLYSSAFKKHSSPSPINDGLYHLLLQSLYNILELIHDIFQSLKGFILKSTFTNLFPHLFNGVHLWCVWRNKCKANISRNL

SEQ ID NO: 1421 - protein, 229 aa, Streptococcus pneumoniae
METKKIKNLKGQIIVSCQALEGEPLYTPNGGVMPLLAKAAFQAGAKGIRANSVRDISEIKEEVDLPIIGIIKRDYDGFEPFISATMKEIDELVSEGVDILALDCTNRSRPGYDNITDFIHDIKVKYPNQLLMADISTFEEGKVAAESGVDFVGTTLSGYTPYSPKKDNPDFELVERLVKELDVPVIAEGRISTPEQARKMLDLGAYAVVVGGAITRPKEIAQRFINVIK

SEQ ID NO: 1422 - protein, 203 aa, Streptococcus pneumoniae
MTKDILELESQKMSSDTFIDEIKNNYLSIVESTRKLIDGRQIELAIKLIREANQILMIGVGSSGNAAREFESSLLRIGIISKTVIDTHFQLMHTALLKDNDLIIAFSLSGSTKEVEETLLNAKRKNVKIISITNYSSRNIAKLSDCVLLTSKKESYLEGGSLMAKASQLFIIDVICTRLSLINYEDTICKKEEIASLLSNKVE

SEQ ID NO: 1423 - protein, 202 aa, Streptococcus pneumoniae
MQIKFIDKVSNLIMLNLLYVASVVTVIAIGSGESALIATLIKIVRHEESYPYRDFANSFFKDYWKNLGAALISNLPILILLFSLFFLPYIPLPIYIISILRHIGVIYIILHLIATTFLIPLIGRYNNTLKNSLHNSIMLAYKHFFIAVLIRIIEIIPVLLFFILQNQLLVWITLMIFILPSITKYANAFLYNFIFSKYEKLN

SEQ ID NO: 1424 - protein, 279 aa, Streptococcus pneumoniae
MVSGGFRLDFLLETARLARSTYYYQLKQLDGVDKDKEIKTEIQGIDNEHKGNYGYRRIHLELRNRGFVVNHKKVQRLMRILGLTARIRRKRKYSSYQGEIGKKAENLIQRQFEASRPMEKCYTDVTEFAIPNSTQKLYLSPVLDGFNSEIIAYHLSTSPNLEQVKSMLEQAFTEKYYENTILHSDQGWQYQHDSYHRFLESKEIQASMSRKGNSPDNGMMESFFGILKSEMFYGYEKNFRSLENLEQAIVDYIDYYNNKRIKVKLKGLSSVQYRTKSFG

SEQ ID NO: 1425 - protein, 178 aa, Streptococcus pneumoniae; identical to SEQ ID NO: 604

SEQ ID NO: 1426 - protein, 395 aa, Streptococcus pneumoniae
MVISKTKKYKGVYKDSKGKIYFQIELGVDPITGKRIQKKGRKNQQGLPFNSFKEAYEEILRLKHEFVNSTINNSFLTFREFMEEIYLKYYQQKVQFVTYQTALPHHQLFIKQFGSKKLSDISTIDCERFRLAIIDKYSSNYAKNMWSRFKACLGYAERLGYIDRVPFKGLDNPRGKHPDTKFWTFDEFKKIINSFDISEYEGLHNYMTIWLYFMTGLRVSEGIALKWEDIDFERKWIHVHSTIEKDKNGVWYAKQQTKTVAGNRKIDLDDFTITILKKWREVQIKNDDKDYVISRFGAPLCKSTISRIIKRHAKITGVPEITGKGLRHSHASYLINVLHKDTLYVSYRLGHADKSTTLNTYSHWYYSGDSTISEEITNSLDNLGLSIYLPNSCQS

SEQ ID NO: 1427 - protein, 89 aa, Streptococcus pneumoniae
METVNYKDLVAIGFPEHTSRNIIRQAKKIAVKKFEEARKNDKNAVQLGCSPFDNKRLGIAPKNIVENLIGISFSDIEGEKNGYIKDKEI

SEQ ID NO: 1428 - protein, 74 aa, Streptococcus pneumoniae
MLKRIRDLREDDDLTQEYIAKIVLNCTRSSYSKMEAGSRLISINDLIKLADFYKVSLDYLVGRVDNKEDHYSKK

SEQ ID NO: 1429 - protein, 609 aa, Streptococcus pneumoniae
MVITKHFAIHGKNYRSKLVKYILNPSKTKNLALVSDFGMRNYLDFPSYKELVKMYNDNFLSNDGLYEFRHDRQEVNQRRIYSHHIIQSFSPDDHLTPEQINRIGYETVKELTGGRFRFIVATHVDKGHIHNHIILNSIDQNSDKKFLWNYKSERNLRMVSDRLSKIAGAKIIENRYSHRQYEVYRKTNYKYEIKQRVYFLIENSKNFEDFRKKAKALHLIIDFRHKHVTFFMTDSNMKQVVRDDKLNRKQPYNETYFKQKFVQREIINILEFLLPKMKNMNELIQQAEFFDLKIIPKEKHVLFEFNGIKLSEQELGKMNQYSVSYFQDYFNNKNETFVLDNNNLIELYNKEKLIKEKELPTEEVVWKSYQDFKRNRDAVHELEVELNLNQIEAVVDDGIYIKVQFGIRQEGLIFVPNIQINMEEEKVKVFLRETSSYYVYHKDSADKNRFMKGKTLIRQFTLQHEPQHMYRRIPLSKIKEKIEQLDFLISAENSPNDFEDITNDFIAQISYLENMIEQVQNKIDDLTNLEEVLLNNTTNSSSNLENSIQGKSSVDTIEKDLYIYKGKIETLKEQHGEAINLFEMFNKTIKKYKKKQNMKSIEENEIHLE

SEQ ID NO: 1430 - protein, 118 aa, Streptococcus pneumoniae
MKRDIRSIRKQFRLTETEEKQILDLMREKGEDNFSDFLRKSLLLSDGQKQMEKWFNLWKKQKLEQISRDVHEILIIAKINHQVTQEHVSILLTCIQELIKEVEKTSPLSENFRNKYMR

SEQ ID NO: 1431 - protein, 84 aa, Streptococcus pneumoniae
MEYVEAVNQFIERHYKEKDIGHIEIDFWGNKNHPHSLYIYKRSKKIEYDYFFFDSIDYYEEPDFLEFKYIVHLENITYIFWQED

SEQ ID NO: 1432 - protein, 1334 aa, Streptococcus pneumoniae
MTTLDFKTLFKEEYDKLNKQQKKAVDTVEGPVMVIAGPGTGKTQILSRRVANILTNYHTSSEEIVCLTYTEAGASEMLDRLEKLIGEEGRKVRVSTIHAFCSELILRNSEIFGGQPKIISTAAKYEILKEIMDEYVIEGNPLYKNSGKRYSAKDQLLELFYKMKRENLNKEDFEKEIDEYFKMIDLSIPGDDLYSKFKYARNSKSKDKKVGDYKDKAINELKENTQKLLAGVEIIEKYSSDISNHNYFDFDDMILWTIEKLEENEGFQRSVSDTIRYLFVDEFQDTSVVQNKLVDLLVKGKDNPNIFVVGDDDQSIYRFQGVSANNIRDFDKKYKPTKIVLDENYRSSQAIIDASRQLISHNPREEKLLIAAGANKDYDYQLPILKSYENAKAEMFGVLTEIKELIDSGVSPNEIGVIYGRNSYGEEFAKILRDKGIFVQMKENKDLFSEPFFKKIVAILKYLCKPSRDVRELRKIVYFDFFEVVLSQIVMIRNLKKDEKISIPTIAEIDQKLEIIRKKVNQSSKYLSPMYVLSDVLKSLSIDEYIMKSKEKYHLVSVLNELYKLMLMECHIHPKLTVKGFLNQLSALEEMGISLPIEDISGSPSNCVQLMTAHGSKGLEFDHVFIMKCNDGKKKSEAWPGGENNSGRFSYPPSLNGKDENESQLKEEENRRLFYVAMTRAKKVLHLSYANDSTKTHLINEFEEFIDEVDVTESFEDCQSVDKVVMPKFSNNVINEIFDELSLSVSTLNSFLKCPLSFYFNKGLKLPSETNEAMVFGSIIHEVLEKIYISVDGSQSSELTAKTVLSLEEALKLFETVFEEKSYQLTSNKIKKDDYARGKKIIENLYKKSGYLKDGVVAVEVPIQGIRLGDILNTTVDLSEVSNIEINGKIDKIECDGNIVCLVDYKTGNFENAKKKLVAPSEKEPLGGDYWRQAVFYYILFKNAGIDISDKEILVKYVLVENSTNEDGFSETEDIRITQKEVDIVLNQIKESIMKIKQGDFNCGCGVLKKDRDNYPCDYCLQVSANTTPKFDNTEALEVATYQQTRGNYKSLSVSKLNRYLRCPKSIYFEDVLQLSQAAGLSAGAKEKSTKITINHAPTGPVFGTAIHETMEKIYKEDLQLEDAIEFYDSSLYSHQEEIIDTMSVEELKEYGHNLLTNLFEHFIPNSLKGEHVSLEKELRVKLGDNYSINGIIDKLEFDNDLIRVVDYKTGSAQRGVEELEVGHDYWRQAVFYNLLLENSSEIDTTDKRIETQYIFLDDNSTESGYSIHTIQVTKEDLDLVTSQIQNFWSHMNTADFTGSCGKNDCDYCRLAEFVDFELLKETIESGKESNLVN

SEQ ID NO: 1433 - protein, 39 aa, Streptococcus pneumoniae
MSGRLTRQNYYLLGKLIDEFHAVKAAMRVIETKRNDFNI

SEQ ID NO: 1434 - protein, 316 aa, Streptococcus pneumoniae
MKPQERLLTIFFRLQAGERLSKAQLSDEYEIDYRTVQRYMSTLKNFLQEQRISNTEIKFDTSDNTYRLIAKTTFNKKDILVISKILLENRALNKSELYSLLEDLLSLLSSEEQKEIDAIIGSERFNYKSLTNDKDRIDTIWILSEAIRREQMLEIEYKAPLKDIKSHIIFPVSLYYDAHYFYLVAYHLKHENYTTYRVDRMESLSESHVKKPEISYGRKYRDGEVRNQKVDAFEGRKIDVTLIYKGNTEIVLDQFPEREILSENHDEIKVKIKTQDTPGLKRWILGQGDAVTLLSPSKLIEEIQESLENTLRNYKK

SEQ ID NO: 1435 - protein, 372 aa, Streptococcus pneumoniae
MSVQKTKNTLNEPLKTLLDEYHDKVGKINNSSELFDIYSPWNNFNIEKMIESFNKALQSNSNNFSWLDIEEDLPKSTDVDIKYGLPNHIKGNIDEATLFLCLVNPNIDEVKTEKKDVGIHTYYKKAREMESGDDSLNILNDKGKLRIDPKVYIKEHILDVRETSSILYNELQIVKQTRSYKDTYYLGHYLPHFIKEFLNKKGSFKNVIHNLTDEWDELEKMSKKIANLEAFPFRSQNPNYTYKSNKRATNFTNLLIESDSKVNLLSARVIIWRIVKHLESSQHKPAFILRRFNTFWLPTISKVLEQDLNFTKEEINQIINALDEEYFFTVRKKDYNGQSGYFGRNFCKNNERISNSSFKHLVQETLGEYVKK

SEQ ID NO: 1436 - protein, 598 aa, Streptococcus pneumoniae
MSGSFSDSPTHDDKFSIENYINGLSNFIIECETPLTVAIQGDWGTGKTSIMYQVEKRLNPEKQDKKIQTIFFNTWQYSQFDMGNNLAVALITDLISELNVEDSKKKQFFKKAKGALSKGLEYVNLDFGILNGEKLTEKFQDLIIGFGERTDDIKHLKENLQDIINDAIKENKSDRIVIFIDDLDRLVPEKAIELLEVLKLFLDCEHCVFVLAIDYNVVVRGAKSKYGKDLDDEKGKAFFEKIIQVPFTVPVANYDLQNFIESSLKKLDFCFDKNNKERNQLETITQLIRYSIGNNPRSINRLFNSVSLLMYINNGDKVDHDEKLMILAMVCFQLRFEEAYNYLLTAYNNSPEDSDDIESYLIDLLENSFELLDDEVYYNSLVSLLGKFTFKDKKDRDDFTNFYRTLKELLGYNEQGLTMEQFNKLIEKMTFSNAVSIGNTDTITADKKKQNHAPNEDVQFVIRKLFNTLVGDENYFDLKKPELFGKETREKREAPLSEEFISIPNEFDRIRLTRGKGQGLNIYSSHNKSNFIYISGDTHGRMLNDGMAIVVNNNLVEKIKDNILASDLRSEELYHEFEMNFRDNLNKLLSKASKILNN

SEQ ID NO: 1437 - protein, 88 aa, Streptococcus pneumoniae
MEFIRAANQFIENYYPREDLDRIESIEIGIRDSENYSRYFLEIQKQSEEFECDFFNFDNIDYYVVDDSVHFKQIINLENSSYVFWKDY

SEQ ID NO: 1438 - protein, 234 aa, Streptococcus pneumoniae
MNKPIAAIFDIDGTIFRDSLLLKHMEKCVSYDVFPNSVNSEIKFHKNAWENRELDYDDYLYIAATLYTKYIADKDILDIDFVAKKVIEKESKKLYRYTRDRIKWHKEQGHQIIFISGSPDFLVSKMAEKLGADIWYASNYLQLDSKYTGEVIPMWDSTSKLQVLKKLFIDFEKSYAYGDTTGDFTMLQSVGFPTAINPNKKLLDKITMEKLDCKIIIERKDVIYKLDEVTHGIY

SEQ ID NO: 1439 - protein, 188 aa, Streptococcus pneumoniae
MTNAKEFALTAHKNQTRKGKITPYSFHLFLVNNILETLTEDPHIIATGWLHDTVEDTDVSLEDIKQEFNDEIYSYMSLESEDKSIKDWQTRKELQLAKFREAAEDESLRKVLLVTFSDKLANLMELYQDYLIIGGLLWDRFNSKDPKKQRWYFNEFYKIFKDNQDLFSKNKDILNNYKEILKLLFYNN

SEQ ID NO: 1440 - protein, 74 aa, Streptococcus pneumoniae
LKAIVKNPKRLFELLRLYFVPVKGRKVVHVPAYAYKEDENEKIYLHNNELHLSKKMFEFLVNQGLDLVECLPEE

SEQ ID NO: 1441 - protein, 205 aa, Streptococcus pneumoniae
MANSSEAHGRVYIKASNLKTIEDFLLIQEERNKYVYYPTDIIDSQSNISDIVSSRTTQENGYYICNMWFTAEGRWCFENNIDDFFDCTLFQDTDDVLIRQMKEYVCSQDIQIKFEYVDAEASQNFVKEQEATITYNSKTKDISIDVKTIKDLPYTAENLIVYGYYECDEIVSVQFLLDYYDDYLRGNEFYLKHKDGIVPILERQQ

SEQ ID NO: 1442 - protein, 240 aa, Streptococcus pneumoniae
MAESALINLINFSKENEELTNLVSGHASKREKATISKDGLIQARSIENFIDNYALSDFDFSTIKEKCVFIKINNSFQADDTTEDIYHNVRGVWNISESRKKDLEYALALYRGVCVGVYKIQGWKKAYEHSSEYPFPTRKEGGKIETSEETIVKYSNIEDLKKDYPELYKRSFSNSEFPQKSLDKWRNRSFFYGNWDGSDVPQHLAQCLNKRIINIPKFTKSVKEFKSIDNQASVIYNDLK

SEQ ID NO: 1443 - protein, 281 aa, Streptococcus pneumoniae
MDLVEDCNTFLSFVADKTLEKQKLYKANSCKNRFCPVCAWRKARKDALGLSLMMQYIKQQEKKEFIFLTLTTPNVMSDELENEIKRYNNSFRKLIKRKKVGSVIKGYVRKLEITYNKKRDDYNPHFHVLIAVNKSYFTDKRYYISQQEWLDLWRDVTGISEITQVQVQKIRQNNNKELYEMAKYSGKDSDYLINQKVFDAFYKSLKGKQVLVYSGLFKEAKKKLKNGDLDYLKEIDPTEYIYQIFYIWKQKEYLASELYDLTEQEKREINHKMIDEIEEEQ

SEQ ID NO: 1444 - protein, 216 aa, Streptococcus pneumoniae
MNFNKIDLDNWKRKEIFNHYLNQQTTFSITTEIDISVLYRNIKQEGYKFYPAFIFLVTRVINSNTAFRTGYNSDGELGYWDKLEPLYTIFDGVSKTFSGIWTPVKNDFKEFYDLYLSDVEKYNGSGKLFPKTPIPENAFSLSIIPWTSFTGFNLNINNNSNYLLPIITAGKFINKGNSIYLPLSLQVHHSVCDGYHAGLFMNSIQELSDRPNDWLL

SEQ ID NO: 1445 - protein, 82 aa, Streptococcus pneumoniae
MNYQKLNDITGATKNEKDKYYVYGLYEEGKQLPFYIGKGEGTRLISHIDEALTEINQEENIQISKKIQIIRKHKGKIIPVII

SEQ ID NO: 1446 - protein, 262 aa, Streptococcus pneumoniae
MTTTKNPWNQLSNVDINGEQAILATEDVELIKKYTSTKHYKNLKDDIYRLQLGFCPQQFVGDIQNADIIVLSKNPGYTPEFKTLYDHDKNYQKTLLNNLQLKGNLYFHAFDLDTNEFGYWAKKFKVWFDDVDNLQDLKEKLPWFSKHVALAEYFPYYSTKYDDKLNDFISKEGYFPTQKFLFNLIRERVLDDNDPVIIIITRSYNKWYDAIPQLKEYKNCYETSNPSNPSLKPENLLKVKRYSAKKEVEKVLEDSLKKLEHK

SEQ ID NO: 1447 - protein, 90 aa, Streptococcus pneumoniae
MFTKLFKKNQDNSDVFKKLIHRLSDMSIQDLKKIDRLLDIIFTPDQGSEQLKTEATYREETLDDTLKEAKNQLHMEQLEKNLERFRKNSQ

SEQ ID NO: 1448 - protein, 127 aa, Streptococcus pneumoniae
MTKDWNFNQPLESKSENQEDPDKIAALFGNHQGGNEVNYEAAFQKRKQAPVTESNSSSKPKVTEVRTGKETDITTSYQQHLKRLIADNNSDIQSSQKKIEELHTLIDTKNKDNKKLQSIYDAISELH

SEQ ID NO: 1449 - protein, 77 aa, Streptococcus pneumoniae
MTIIERLEEKVTRQESKVARETEKLAAYKEQLETAMFATFKRRQSISHMSFEEALDHAFGKERQFDDSEFRKDEMSE

SEQ ID NO: 1450 - protein, 361 aa, Streptococcus pneumoniae
MEIEECKKISILDVANRLGISFKQVSSSVYEHPEHDSFRIFSTTNTFKWFSRDIQGDVIDFVRLVKGISFKEALAFLSEEPFQKEAVQEKRERPFYYPLKRIEDSNCSLARYYLTECRGISEEIIQKMIQQGLMSQASWKTNETVEPVIVFKSFDHRHKLQAASLQGIYKNHSLPRERLKTILKGSHGHVGISFDIGKPNRLVFCESFIDLMSYYELHQQNLFDVRLVSMEGLKRSVVAYQTLRLIAEENQKLEFLDTVIPSKLLPLINTIRDTTSYFDNHPDLLTLAVDCDDAGKDFSDKLSRSGFPVFLDLPDNESGKEKRDWNDILREKKSDLQLMIENAKETLRNQPVRQTSQCLEL

SEQ ID NO: 1451 - protein, 213 aa, Streptococcus pneumoniae
MLNKVKTKALISVGAVAATSFILMVGYTIGQHSTAKQSRKEIELAATKLVEDKQAEDKASILSSDTVKEFLTQYYTKEKLGENNTRIQPYMTESAYSQELSSQNDAMNQVYKDYILDYHFEKADIFVNQTTNQAIAMVSYNVTYVSDLKNANQSKTNQTETRTVKLSYSKLPGKLLVNQVQVWKSGLDDLDKVTPKTLEESSSIPSLPNTTTK

SEQ ID NO: 1452 - protein, 707 aa, Streptococcus pneumoniae
LKKVKFIQQLSETSCGLACMAMILDYYGHEANLYELCCDFENSRDGLSIREIKDIASYFGLDSKATEILNIKKFLGNKFVEPYIALTQNAHYIVVEKHNEHSVVFIDPERGRITEDISNFANNISGIVIFFSPNRKFTKKKKHSNFFKILKIGKIDIKRLCYISLISILVQSLTLLLPLLTRFIIDNVISKGEMYRLGMLFSIFSLITFYALFSFIRTKLIITVEKRYIFTLKDKIVGKIFTLPMKFFDSRSSGEIVTRINNLDSLEKIISSGISSLLIDLSTIIIAFIAMAMISLYFTLIITCFAIFLFIVLYFLLKKLEEKNSNFISSKELTQGYLMEIFSNLLFLKVSAKGDVSYTKWKEMFSNELKFDVERENYLNIFQTFISIYRLVPNLLILILGGLEVQQHMMSLGSLMSFLSLVSLLLSPITLIVQNCFQFQFCFTILDRVFDIIYTPEEKNQFSISKLPPFEMMTFRNLSFAYSSACKVIYDISLTIKKGERIAIVGRTGCGKTTLIKLLLRLYDVEKNTILYNGNDINLFDLNSYRKSFGVVLQNDVMFNDTVISNIDLTHSHSMEDVISAASLAELDIEINNMPMGYYTSIGDNGNNLSGGQRQRLAIARAILQNPEIIIFDEGTGQLDTITEKKIMDNLKHKGITQIFITHRLSNAQEYDNIIVMDNGKIIDSGKHDELCGKEGMYKRLFETSYN

SEQ ID NO: 1453 - protein, 1083 aa, Streptococcus pneumoniae
MNRKLNITDFKDASYFSERKISSHDLGDGLKSRKRKEYWDNFIGEGSNEFWKYLQEKNDFSKHDLDIFLEEHTYDVKDIDSFSHMDEFIEFFFKRNDYTLPEFYIVDSEGKRKPIFSNFVIPFLKFAAYKLEDNLSSQNLKVTRDVLNSLLIALFQQILNISYRTLILELQVLKEQNMLKGETGEKRFKYFSEIYLSDHFWDILKEYPVMFRLIIENIQNWVTNNVEFLTNLKEDKALLQEHFSINGELTKIESGVSDFHNHGKSVYLLWFGTNKLVYKPRDLILDVKFQNLLSWYNLKFNKNLYVTNILNRGNYGWVEYIEHLPCTYESDFIQFYTHLGYLLFLLFAMRGNDIHFENIIAKGNRPVLVDIETLFHNTTEYRKEYETADKLIFSLLEKSVKRVGILPNIVWGKDGNSGVDISGLSSSAGEMIPIERASIMHSMTDEMKIGYEQSALQSKDNQPFIQSGKDVDLNSYKNYVSAGFKEAYEIISKDPSSIEEFLVEIEKFNNAYSRQIMRPTQFYSNLIQTSYHPSFLRSGLDREMLFSKVWKIVFEDKKVQRIASSEFESLLLGDIPLFQTKISDRFLCSELTKYQNFFNISGMELAIQQIKDFCQKDMEFQLNLIETTLNYDPSYNLVQDSFVPLKPSVKVIRNLNQKEIQETKSRIVPLTEKIADYLSKISYSGTSGDICWVDMNILGEKTNDWNMVPIGCDLYNGISGIMLFYLFLYLETKKKDYLIYLKKCYRSLKYYLDSRKQFATHSQVLFGGFSGETPIIYVLLLLKTRMPEHFNSDELDVYIYDIIDDLKKGYRYDENFDVLVGSAGAIIHLLNVFEVTRDEELLILAHDLFSHLEKNSTKITVEGQDGRAWKGTMASNPLAGFAHGVSGIVWALSKLSRYFPEDKKLKTIIKQGIIFENSMFDTEKSNWSDYRETESGIKYKDIVENIPVSWCHGAPGILISRLELYKNNTLNVEFRRTMKSDMDVAIDTTIKYGFGKSHCLCHGDLGNLNILFYVAKKMSSEHLYNVVYSYLNTILDDLESENWKCGLPYKNSPSLMSGIAGIGLGLLTLNNLSIPSVINLEIW

SEQ ID NO: 1454 - protein, 242 aa, Streptococcus pneumoniae
MLMLEFTKLRRRKILYMIPFVAILLFLLEFMIGHQIYQGHSYGSVNGWYVENGFFFLNYYFLLPFASMILVDLIRIEQVSKTISNLRLIPVDLKQLLQAKFMLALLINLLVSEFTFLAMLVLELMDGDFAFSSLAMLSWGVVYGAIAFAYTLSAGIIVLFLGKYRKELILALPLAFLLSFAGLFALTTVVGRYYLANLLLIIMEQFTALTVSVYAIWLVTLVACLLYLLADKRMMNIIFAYK

SEQ ID NO: 1455 - protein, 246 aa, Streptococcus pneumoniae
LLDLVKIEFLKQRHQKLNFVVYGVVSLYLALICYYVNDARGLFDSFPFVYKFSLSYLNFLILPLYCVSYTIQAFGLEYRYRIMNNLKLASANLMKTFWAKILYIEINALCIMLFTYISVSLFALLSRFSSTVSLSLLLRFFYLCMSSGILIPMGVFPLVALVMIKVRGKEIVGNLVGVMYVLVSFFLARTSPNISPVTSANSLIWEGNREGVVLQQPAILSIVVLGLSLLVLSFLSIKSWLRKVDE

SEQ ID NO: 1456 - protein, 311 aa, Streptococcus pneumoniae
MRNPVIQTFNLSKSYDGKIVLDRIDFTLRQGEIYGLLGRNGTGKTTFIKAILGLTAMDSGEVNILSEKLLGEFSKDLLSQIGVVLDSASFYPNLTGPENLSIFARLRGISLKQVEQALQVVGLDGENKKLFKQYSLGMKQRLAIANAIMHQPKILILDEPTNGLDPIGILEMRRYLKELSTNHGISILISSHIISELEKLVDRVGILHDAHLMAEKTMKELIDGADKRKIHLIVSDAPQAKEVLCRINLQEQISILSDIELELQGESPTFDIAVVSNSLKDNGIVLKEYSYKNNESLEDYFKRITGGEGIA

SEQ ID NO: 1457 - protein, 286 aa, Streptococcus pneumoniae
MTILSDKLKAKRKEKGFSQKTLSEGICEQSQISKIERGNYMPAADLLYKLANRLQVPLDYFFDEQIEMTSNITPFKKLAEKLLEDRNYEDLEYLLNLEKEKSQYLSTEDEFYLLWIQSIILFYLHSSKDEAIASLENALPKLSVSSSVYLKLLNTLSNFYFSVGRDAEYEENNSLLISLYQEKDLNHQEYLFGYIRVKHNFAYYLHSKGKELEAVQEALETIDFCKQKETSYQLAPLLTIVANAGKDFLKHDEILDYYLQARDICKIYEHKLMMAKIDHFLKDKDR

SEQ ID NO: 1458 - protein, 96 aa, Streptococcus pneumoniae
MNDLLLIPVIFLAVGGILILLWRLFLIASGLFLIGFVSFLIFVEVYGIYLLFTETELYTADLAQNGLFGFTTFFIIFNLVLLALACWAGYKWKRGY

SEQ ID NO: 1459 - protein, 93 aa, Streptococcus pneumoniae
MEDTYYQLEEALVQGFQTPEEYQAYKELKEHYEEVTGDYSFSKRELTSQLEIALQNHRGVDFEEYEKKDYLELVQKLEEFDSSLATHYRQLID

SEQ ID NO: 1460 - protein, 323 aa, Streptococcus pneumoniae
MVRRWVLSLQRNGRIIRQGNENKEVDIYHYITKGSFDNYLWATQENKLRYIKQIMTSKEPIRAAEDIDEQTMTASDFKALATGNPYLKYKMELENDLTLLENQRRAFQRSKDHYRHTISYCEENMPILEKRLSKYEGDIQQSEISKDQAFSMRVGKQSFDQRAEAGESLHRLIRHNQADSKEFRTLASYRGFDIKMLSLPTNQPLPETFSVKIVGENQYSVSLDLYSPLGTIQRLQHTIDHIKEDQVKTQNLLDELKDKWNTAKVEIEKNFPKEEDYQTKKAEYDVLAPLIETETDLDTIDQALRQFHEKGKEKQEQLSFELD

SEQ ID NO: 1461 - protein, 603 aa, Streptococcus pneumoniae
MRNPQNVLNNLTKHSKDKNYQFERLYRLLYNKEMYLVAYQTIYANPGHLTPGVDELTIDGMSIARIDQLIDSLKDESYQPHPSRRTYIPKKNGKLRPLGIPSFDDKLLQQVIKMILEAIYEGQFEPSSHGFRPNKSCHTALTQIQKTYTGTKWFIEGDIKSFFDNINHDVMIHILRERITDERFLRLIRKFLNAGYVEDWKFYKTYSGTPQGGIISPILANIYLDKFDKYMTDYVKNFCQGKYRKRTPEYRQNEIALGKARRALECVSTENQRQEVIQRIRQLEKERVLIPHSDPMDSSFKRLTYTRYADDFICGVIGSKEDAHRIKADIKDYLEAVLKLELSVEKTLITNARDKAKFLGYHLYIRQSNLAKRDSAGRLVRNYTGRLVLEVSIETIRDRLLSYGAMKMTYHRGYEVWKPTARYFMKDCDDLEILERYNAEIRGFYNYYCIANNSSILHRFKYIMEYSMYKTYATKYRTTKSHIIRKYKKDGQFSVQYIGRKGDTMTRYLYNGGFKRQKKSFLENDNLPNTAKYFSRTNLIDRLKASRCEYCQATDSSLEIHHVRKLKDLKGKTFWERLMISRQRKTIALCKDCHKKLHHGKLD

SEQ ID NO: 1462 - protein, 1765 aa, Streptococcus pneumoniae
MEVMKLLAMFRGTIPKDREKMDLFLRYQAQHFDEKWQDLVESFLAEEGKIEEIPHVYSFHQDIISFLEASSENNDQDLESYTRNFGQAGLSKLSQLSNFEKNLVLEVATYNLSTRFYIQSEKEKLEPLSELVCLQNQDVNLVNVYRVANNLSDRISRDIEEFLLMVDSKELTKEVLEIHFEEKEGDVLAYLGSELMATLDTVTDLVHHEENYTQLPLTQKLKIITHFDDVKARSEKSNQVEEVLSPSSDIEQETEETNSFSNVDKIVEEALREYPIGSQVSYKGQVFQLVSIENAQLNDLIRLELFNDSNQLFEENPILYLNSLEEIEQVLSLVELEKEDSEIEIDSSSESQEIDLFSYLEEEKENEKDKETETLIVGIEETDVPVQDFVFPDDLEDFYPKTNREKIETNIAAIELVKRLEKEGRQANPEEQELLAKYVGWGGLANEFFDELNPKYETERLTLKSLVSKSEYSTMKQSSLTAYYTDPMIIRQIWQKLLDDGFEGGRILDPSMGTGNFFAAMPRSIRDKSELYGVELDSVTGAIAKKLHPNTHIEVRGFEEVPYQNNSFDLVLTNVPFGNFRIADKNYDKPYMIHDYFVKHSLDLVRDGGQVSIISSIGTMDKRTDNVLQEIKTNTHFLGGVRLPDTAFKSIAGTRVTTDILFFQKDQAKNLNEEELVFSGSIPFEEDKRVWINPYFDGKYNTQVLGEYEVRNFNGGTLNVKGVSETLSTDIMKALENVEAPKQIDNFLKAPVFIQEEVDNSLPSRIREDLALYSFGYERNQIYYRDTHGIRKSSKVDEISYYVDEKGDFKAWDSSLSEHKIDRFVQLHLTDEEALDVYKSEEASKRGKYKGLFKKTVFYESPLSDKDISRIKGMVDLRETYQSLIEIQRHQDYSRTDFQVLLSKLNHNYDRFVSQFGYLNASVNRNLFDSDDKYSLLASLEDEYIDSKDQKVKYKKSLAFEKALVRPERVIARVSTALDALNSSLSDGRGVDLDYMVSIYPEHSQAAILDELGDQILIDPESYLRGERKYLSKNQFLSGDILNKIEVVQLLVEENNQEYDWNHALDLLESVRPPRIHLADIEFKIGSRWIPQSVYGKFAFECFTNREFELSSPDVEQVIEANPVDGQVHLRTSFAYRYPSAKDSSLGVSGSRYDTGRKIFENLLNSNQPTITMTVTEGEKKKTITDLEKTSVLRAKEQHLQELFQDFVSRYPEVQQVIEESYNRLYNRTVSREYDGSHLVIDGLAQNISLRPHQENAIQRIVEEKRALLAHEVGSGKTLTMLGAGFKLKELGMVHKPLYVVPSSLSAQFGQEIMKFFPTKKVFVTTKKDFVKARRKQFVSRIITGDYDAIVIGDSQFEKIPVSKERQMNYIEDKLNELREIKTHSENKYTVKEAEQSISGLEKQLEELQRFNRDSFIDFENLGIDFLFVDEAHHFKNIRPITGLGNVAGITNTTSKKNVDMEMKVRQIQEEHDFKNIVFATGTPVSNSISELYTMMNYIQPDILKRYQVDYFDSWVGAFGEIQNSMELAPTGDKYQPKKRFKKFVNLPELMKIYKETADIQTQDMLDLPVPEAHIIPIESELTENQKLYLEELVMRSDMVKCGTVDPSQDNMLKITGEARKLAIDMRLLDSSYSLADNHKLLQVVDNVERIYREGMENKATQMIFSDIGTPKKKDNGFDVYSEIKALLVDRGIPSKEIAFVHDANSDEKKNSLSRKVNAGEVRILLASTEKGGTGLNVQSKMKAVHHLDVPWRPSDIQRASVKAV

SEQ ID NO: 1463 - protein, 136 aa, Streptococcus pneumoniae
MEGIYQRDSDQDGLTDAQELALGTNPLSADSDGDGRSDLVEVEEGTNPLEKDLQDIDQTSITEPSSVFMEMKQKISDMMESHYKEFIQALISIETGIENEQDLEDLYTYYMRTDSISLLSSDLETSPQKVEMEIEL

SEQ ID NO: 1464 - protein, 231 aa, Streptococcus pneumoniae
VADTRTKSDSNLGRKGQAVADTRINRLTRWLTDSVNHLFCEENMANSRDYRNPNYTEKIKLQRFFTQLQIAASFFKEHFVGKIMYYETEIESVELHFSPTNFMHLCGVDYRKGAGSFFDDCLNRHVIIDELKIKKDGTTMQKLQVLGSIEELLGKHVHLTGSGRYLYLEFDYALRTRKQILALTLKETSRKIVPQSLLDLKRKTVFPKGQKVISIYSKHLQTSELFYYLKD

SEQ ID NO: 1465 - protein, 937 aa, Streptococcus pneumoniae
MKDKREIIRARKAFRRSLKDEKKFLKKGKKEVKKQKKDSAVLDEKAWKKEIKKKLEEMREASKARVKQANEDYNHILQNSPPSLLNRKELRDRRLPHARKRLKIAKKQYREAKVEAKEERKESRKERKTNQKFLYGQESKAKSNFFFQGKSLEELKVKKEVKTAKENLKSTKQAYKSKKVSRKAKTFLYVLGREGGELASENEDLDGYRTLQETIRKGKRYSRLSYNLGKASVKTGQATCRFTKKRLTNTKERYHHFKDGKGWKLAKDKPSSFKNRFRKLKKQGLTSVRNIYQKLKAAFSFFTFAAGNPVTWIVGGIVFLLLLIMSFFLGFSSASLIQQDEFELTKAYTHLTWEDAEHTRTNDKGITYYTKVDDVMGYMNFKFHDYELHKPVHLFSSETYKDYLSTLWHDLNDGEDLKSMQDLYETPKYKLSKDDQEEMKELKEEGIYASMQELDNPFEGKSNEDSLTMTYRYGYYDLDGKPTLQEYILLEAKAHQTIVAPMDGVVSLDGDNVILTNGKGENESRLTLYSIHNGRAIEGTRVLTGDIIGETPDDTGLKVSYQKYKNKKEKLVYVNPQFYFPKVIQLQTTILPAIGQFGGDEFERAKHIYEFLKSQGASPQAIAAILGNWSVESSINPKRAEGDYLSPPVGATDSSWDNETWLAIGGPAIYSGAYPNILHRGLGLGQWTDTADGSTRHTALLNYAHSKNKKWYDLDLQLDFMLHGDSPYYQSWLKDFFGNTGSAANLAQLFLTYWEGNSGDKLLERQTRATEWYYQIEKGFSQTNGGQAKSDPQSLEGVRGDLYDHSVPGGGDGMAYAYGQCTWGVAARMNQLGLKLKGRNGEKISIINTMGNGQDWVATASSLGGETGSTPKAGAIVSFVGGTHGTPAIYGHVAFVEKVYDDGSFLVSETNYGGNPNYTFRKISQADSAISFAYTTK

SEQ ID NO: 1466 - protein, 771 aa, Streptococcus pneumoniae
MTYKKEEVKGKKEEVLPSTANTISYQALYQNGLMQVKEDYFSQSYLLGDVNYQTVGLEDKGAIIEKYSDLINSLDDQTNFQLTIFNKRLNLEKFRQSVLYEEKEDGYDTYRKELNRMMNQNLDSGENNFSAVKLISFGRKDSNPKQAYRSLSQIGEYFKSGFSEIDARFESLAGEERVNLLADMLRGEHHLPFSYCDLTRSGQTTRHFIAPNLLDFKNKNYLQINDRLLQIVYVRDYGMELGDQFIRDLMQGDLELIVSLHAQSSTKADAMKKLRTKKTLMESQKIGEQQKLARTGIYLEKVGHVLESNIDEAEELLKTMTETGDKLFQTVFLIGVFGQDEEELKQALDTIQQVAGSNDLMIDKLPYMQEAAFNCLLPFGCDFLEGVSRSLLTSNIAVNSPWTSVDLQDRSGKYYGINQISSNIITIDRSLLNTPSGLILGTSGAGKGMATKHEIITTKIKESGENTEIIIVDPEAEYSVIGRAFGGEMIDIAPDSQTYLNVLDLSEENMDEDPVKVKSEFLLSFIGKLLDRKMDGREKSIIDRVTRLTYQSFKEPSLEEWVFVLSQQPEEEAQNLALDMELYVEGSLDIFSHKTNIQTGSNFLIYNVKKLGDELKQIALMVVFDQIWNRVVRNQKLGKKTWIYFDEMQLLLLDKYASDFFFKLWSRVRKYGASPTGITQNVETLLLDPNGRRIIANSEFMILLKQAKNDREELVQLLGLSKELEKYLVNPEKGAGLIKAGSVVVPFKNKIPKGTQLFDIMSTDPDKMASN

SEQ ID NO: 1467 - protein, 120 aa, Streptococcus pneumoniae
MNTRVFKDISKYQHRAWLGFTTRQIIFVLPAFIVTIIVLGLNLFFWQFGDWFVYGFVFAFTIPLMLFGVYKPNDLYFEHYLKYRLHFELTVPLRTITGKKGHEHEKKIKYIKETKSFNDL

SEQ ID NO: 1468 - protein, 284 aa, Streptococcus pneumoniae
MNLSLVSPFVYLASEKISAENLFEGFSVDLQSTVDLIKSLSSYNPTVWTYMSSITKSVMQPLGVAILSVVLILEFSKMAKKIANSGGAMTFEALAPMLISYIMVAVVITNTTVIVEAIIGIASHAIEQVASIVAHGGAKYDTISGLKGSGFIGRMIVGFFALLIWLVRIVSAAMVNLLVSIRFIQLYLMIPFAPLTIPTFLSDEWKSIGIGYLKNIMVYAVQGVLIFLIVSLVPLFESAGKIAVSNGAGVLQSLAIMFGSLVQAILLIIALVGSQRTARSILGM

SEQ ID NO: 1469 - protein, 80 aa, Streptococcus pneumoniae
MITHFKGFVYGVDASAMFAQAMSLLQKGLIAVGAFLVVVGIVNLATNIKDGGPGVRNAILEIVGGVMVGAAGAFVTQISI

SEQ ID NO: 1470 - protein, 626 aa, Streptococcus pneumoniae
MMYSGKKFLLFSLLGILLGYLFHRLTLLYDSYTGNSLDKWTHLLMEGQDEVLQSPWNVSFTGKSSAFFLLGFVMMLLVYLYLETGKKQYREGIEYGSAHFGTLKEKKLFYGKEFSHDTILAQDVRLTLLDKKPPQYDRNKNIAVIGGSGSGKTFRFVKPNLIQMNSSNIVVDPKDHLAEKTGKLFLEHGYQVKVLDLVNMKNSDGFNPFRYIETENDLNRMLTVYFNNTKGSGSRSDPFWDEASMTLVRALASYLVDFYNPPKTREQLIEESRLSQKEHQNLLKRQKKEVEERKKRGRYPSFAEISKLIKHLSKGENQEKSVLEILFENYAKKYGTENFTMRNWADFQNYKDKTLDSVIAVTTAKFALFNIQSVMDLTKRDTLDMKTWGKEKSMVYLVIPDNDSTFRFLSALFFSTVFQTLTRQADIDFKGQLPLHVRVYLDEFANIGEIPDFAEQTSTVRSRNMSLVPILQNIAQLQGLYKEKEAWKTILGNCDSLVYLGGNDEDTFKFMSGLLGKQTIDVRNTSRSFGQTGSGSLSHQKIARDLMTPDEVGNMKRHECLVRIANMPVFKSKKYNSTKHPNWKYLANQETDERWWDYQINPLNQSQENHLEGLRIRDLTFESSLK

SEQ ID NO: 1471 - protein, 162 aa, Streptococcus pneumoniae
MSSEQQERMAVQYAERSLLFTVKSLLKILEWSRRQALAQDSAYKIGVQKLEELLQSPYSIDTINLKKDFLDKPIDIEKFKAFLEKEEIPLAIAWQGDSLHFYTKDRSILDNHLDQLLEKMVNDPEKLADFTMDKSLDDAIDEAKSQITFRQEGAVKQKEMVR

SEQ ID NO: 1472 - protein, 99 aa, Streptococcus pneumoniae
MKVVNLYDLKQMGNKGGCTIQLIHHFPFGMGLGHLKKDYIEFKRVGIVDGKAVEVTLREPYSRDLLQVVKSIKQRQKLIAYRYKEGKLLFVKEEASDVL

SEQ ID NO: 1473 - protein, 278 aa, Streptococcus pneumoniae
MFSNANSFKAKIKNISKDKGIPAQQVQQHYLIEQVLKLISTSSYRDSFIVKGGYLIGQMIGLDKRTTMDLDVTLKGTEMSRENLIHIFEEILCSKTDGFSFSVDKLEPIRQDDEYGGFSLKLNATFDTLKEVVFIDITTGDKITPREITYSMTSIFTNESIKIWTYNLETVLAEKLETIISRGLASTRPRDRYDLFTLYKLRKEEINLEVLKNALENTAEKRKSKDTIYNWEEQVRGIEISDYQKELWIRYQRQFKYAKDISFDNSVQVIREIMQQIF

SEQ ID NO: 1474 - protein, 196 aa, Streptococcus pneumoniae
MVDKREKLMNSFNQYGFLTFKQVIDENLHYKTLLKMVAEGKIDAEEKGLYRLPDIYLDEWFVLQYRFPKGIFSLETALWLHGLSLTIPFNMTMSFPYGTNTKNIKEADICPIILRSHYSEGIIEIERLPGQFIKVYEVERVLVECLRPVHQVDLQIIAPAFKKYFQQNKIHLHKLFYYAQLFKVTDKLQSYTEVLS

SEQ ID NO: 1475 - protein, 39 aa, Streptococcus pneumoniae
MRCLFFYPILKGSELMKTKNQESKGRSPLFKTIKHSFSQ

SEQ ID NO: 1476 - protein, 104 aa, Streptococcus pneumoniae
MELKFVIPNMEKTFGNLEFAGEDKVVQRRINGRLTVLSRSYNLYSDVQRADDIVVVLPAEAGEKHFGFEERVKLVNPRITAEGYKIGTRGFTNYLLHADDMIKE

SEQ ID NO: 1477 - protein, 127 aa, Streptococcus pneumoniae
MRLANGIVLDKDTTFGELKFSALRREVRIQNEDGSVSDEIKERTYDLKSKGQGRMIQVSIPASVPLKEFDYNARVELINPIADTVATATYQGADVDWYIKADDIVLTKDSSSFKAQPQAKKEPTQDK

SEQ ID NO: 1478 - protein, 461 aa, Streptococcus pneumoniae
MKQRGKRIRPSGKDLVFHFTIASLLPVFLLVVGLFHVKTIQQINWQDFNLSQADKIDIPYLIISFSVAILICLLVAFVFKRVRYDTVKQLYHRQKLAKMILENKWYESEQVKTEGFFKDSAGRTKEKITYFPKMYYRLKNGLIQIRVEITLGKYQDQLLHLEKKLESGLYCELTDKELKDSYVEYTLLYDTIASRISIDEVEAKDGKLRLMKNVWWEYDKLPHMLIAGGTGGGKTYFILTLIEALLHTDSKLYILDPKNADLADLGSVMANVYYRKEDLLSCIETFYEEMMKRSEEMKQMKNYKTGKNYAYLGLPAHFLIFDEYVAFMEMLGTKENTAVMNKLKQIVMLGRQAGFFLILACQRPDAKYLGDGIRDQFNFRVALGRMSEMGYGMMFGSDVQKDFFLKRIKGRGYVDVGTSVISEFYTPLVPKGYDFLEEIKKLSNSRQSTQATCEAEVAGVD

SEQ ID NO: 1479 - protein, 382 aa, Streptococcus pneumoniae
LAYGLSQNRLAVATGITRQYLSDIETGKVKPSEDLQQSLWEALERFNPDAPLEMLFDYVRIRFPTTDVQQVVENILQLKLSYFLHEDYGFYSYSEHYALGDIFVLCSHELDKGVLVELKGRGCRQFESYLLAQQRSWYEFFMDVLVAGGVMKRLDLAINDKTGILNIPVLTEKCQQEECISVFRSFKSYRSGELVRKEEKECMGNTLYIGSLQSEVYFCIYEKDYEQYKKNDIPIEDAEVKNRFEIRLKNERAYYAVRDLLVYDNPEHTAFKIINRYIRFVDKDDSKPRSDWKLNEEWAWFIGNNRERLKLTTKPEPYSFQRTLNWLSHQVAPTLKVAIKLDEINQTQVVKDILDHAKLTDRHKQILKQQSVKEQDVITTKK

SEQ ID NO: 1480 - protein, 73 aa, Streptococcus pneumoniae
MNFGQNLYNWFLSNAQSLVLLAIVVIGLYLGFKREFSKLIGFLIIAIIAVGLVFNAAGVKDILLELFNRIIGA

SEQ ID NO: 1481 - protein, 38 aa, Streptococcus pneumoniae
MNGVFLIFIIQADFLFDFLKVNGKGKPRTDQFALIVFA

SEQ ID NO: 1482 - protein, 53 aa, Streptococcus pneumoniae
MYDVARYYIEETGALGEVPASLQNYIDYQAYGRDLDLSGTFISTNHGIFEIVY

SEQ ID NO: 1483 - protein, 93 aa, Streptococcus pneumoniae
MYLIGYAIKFTPNCCNGFLWLVSAKRYFFSCIGQLWSQCISNDRLQKSIRLFTIKSFCRHKPCESHRNPKVFEKCSLYHGKRGQVAKYHHCKE

SEQ ID NO: 1484 - protein, 815 aa, Streptococcus pneumoniae
MAYPIKYIENNLVWNKDGECYAYYELVPYNYSFLSPEQKIQVHDSFRQLIAQNRDGKIHALQISTESSIRSAQERSKNEVTGKLKAVAYDKIDQQTDALISMIGENQVNYRFFIGFKLLLNDQEFSMKSLTVEAKNALSDFVYDVNHKLMGDFVSMSNDEILRFQKMEKLLENKISRRFKIRRLDKDDFGYLIEHLYGQTGTAYEEYEYHLSKKKLDNETLIKYYDLIKPTRCLVEEKQRYLKIQQEDETVYVAYFTINSIVGELDFPSSEIFYYQQQQFTFPIDTSMNVEIVANRKALSTVRNKKKELKDLDNHAWQSDNETSSNVAEALESVNELETNLDQSKESMYKLSYVVRVSANDLDELKRRCNEVKDFYDDLSVKLVRPFGDMLGLHEEFLPASKRYMNDYIQYVTSDFLAGLGFGATQMLGENEGIYVGYSLDTGRNVYLKPALASQGVKGSVTNALASAFVGSLGGGKSFANNLIVYYAVLYGAQAVIVDPKAERGRWKETLPEISHEINIVTLTSDEKNKGLLDPYVIMKNPKDSESLAIDILTFLTGISSRDGERFPILRKAIRAVTNSEVRGLMKVIEELRVENTPLSTSIADHIESFTDYDFAHLLFSNGYVEQSISLEKQLNIIQVADLVLPDKETSFEEYTTMELLSVAMLIVISTFALDFIHTDRSIFKIVDLDEAWSFLQVAQGKTLSMKLVRAGRAMNAGVYFVTQNTDDLLDEKLKNNLGLKFAFRSTDLNEIKKTLAFFGVDPEDENNQKRLRDLENGQCLISDLYGRVGVIQFHPVFEELLHAFDTRPPVRKEV

SEQ ID NO: 1485 - protein, 716 aa, Streptococcus pneumoniae
VKPSIVNRIKSNWTLKRLGKVAMTVAFTLVIAIFLLAMLGTVVQAAGLVDDTVNVANEYSRYPLENYQLDFYVDNSWGWLPWNWSDGIGKQVMYGLYAITNFIWTISLYVSNATGYLVQEAYSLDFISATADSIGKNMQTLAGVSANGFSTEGFYVGFLLLLILVLGVYVAYTGLIKRETTKAIHAIMNFVLVFILSASFIAYAPDYIKKINDFSSDISNASLSLGTKIVMPHSDSQGKDSVDLIRDSLFSIQVQQPWLLLQYNSSDIESIGIDRVESLLSTSPDSNNGEDREKIVAEEIEDRSNTNLTITKTINRLGTVFFLFVFNIGISIFVFLLTGIMIFSQVLFIIYAMFLPVSFILSMIPSFDGMSKRAITKLFNTILTRAGITLIITTAFSISTMLYTLSAGYPFFLIAFLQIVTFAGIYFKLGDLMSMFSLQSNDSQSVGSRVMRKPRMLMHAHMHRLQRKLGRSMTTLGAGSAIVTGKKGQSGSGSSARTQADHSRPDGKEKSTLGKRIGQTIGTVADTKDRMVDTASGLKEQVKDLPTNARYAVYQGKSKVKENVRDLTSSISQTKADRASGRKEQQEQRRKTIAKRRSEMKQVKQKKQPASSVHERPTTRQEQYHDEQTSKQSNIQTSYKESQQAKQERPAVKSDFSSPKVERQGNTVQEKTVQKPATSTTTADRTSQRPITKERPSTVQRVPLQNTRTTNQNRHH

SEQ ID NO: 1486 - protein, 333 aa, Streptococcus pneumoniae
MKLKTLVIGGSGLFLMVFSLLLFVAILFSDEQDSGISNIHYGGVNVSAEVLAHKPMVEKYAKEYGVEEYVNILLAIIQVESGGTAEDVMQSSESLGLPPNSLSTEESIKQGVKYFSELLASSERLSVDLESVIQSYNYGGGFLGYVANRGNKYTFELAQSFSKEYSGGEKVSYPNPIAIPINGGWRYNYGNMFYVQLVTQYLVTTEFDDDTVQAIMDEALKYEGWRYVYGGASPTTSFDCSGLTQWTYGKAGINLPRTAQQQYDVTQHIPLSEAQAGDLVFFHSTYNAGSYITHVGIYLGNNRMFHAGDPIGYADLTSPYWQQHLVGAGRIKQ

SEQ ID NO: 1487 - protein, 304 aa, Streptococcus pneumoniae
MMKFRKNQNKEKQIPKEKKPRVYKVNPHKKVVIALWVLLGLSFSFAIFKHFTAIDTHTIHETTIIEKEYVDTHHVENFVENFAKVYYSWEQSDKSIDNRMESLKGYLTDELQALNVDTVRKDIPVSSSVRGFQIWTVEPTGDNEFNVTYSVDQLITEGENTKTVHSAYIVSVYVDGSGNMVLVKNPTITNIPKKSSYKPKAIESEGTVDSITTNEINEFLTTFFKLYPTATASELSYYVNDGILKPIGKEYIFQELVNPIHNRKDNQVTVSLTVEYIDQQTKATQVSQFDLVLEKNGSNWKIIE

SEQ ID NO: 1488 - protein, 639 aa, Streptococcus pneumoniae
MKIINIGVLAHVDAGKTTLTESLLYNSGAITELGSVDKGTTRTDNTLLERQRGITIQTGITSFQWENTKVNIIDTPGHMDFLAEVYRSLSVLDGAILLISAKDGVQAQTRILFHALRKMGIPTIFFINKIDQNGIDLSTVYQDIKEKLSAEIVIKQKVELYPNMCVTNFTESEQWDTVIEGNDDLLEKYMSGKSLEALELEQEESIRFQNCSLFPLYHGSAKSNIGIDNLIEVITNKFYSSTHRGQSELCGKVFKIEYSEKRQRLAYIRLYSGVLHLRDSVRISEKEKIKITEMYTSINGELCKIDKAYSGEIVILQNEFLKLNSVLGDTKLLPQRERIENPLPLLQTTVEPSKPQQREMLLDALLEISDSDPLLRYYVDSATHEIILSFLGKVQMEVTCALLQEKYHVEIEIKEPTVIYMERPLKKAEYTIHIEVPPNPFWASIGLSVAQLPLGSGVQYESSVSLGYLNQSFQNAVMEGIRYGCEQGLYGWNVTDCKICFKYGLYYSPVSTPADFRMLAPIVLEQVLKKAGTELLEPYLSFKIYAPQEYLSRAYNDAPKYCANIVDTQLKNNEVILSGEIPARCIQEYRSDLTFFTNGRSVCLTELKGYHVTTGEPVCQPRRPNSRIDKVRYMFNKIT

SEQ ID NO: 1489 - protein, 140 aa, Streptococcus pneumoniae
MKPSSFQTTIENQFDYICKRAMEDERKNYMLYLSRIAKREVSFSDVGDYLVSQFATTDNYSTDFQIFTLNGLSVGVENDLLSEALRELPDKKREILLLFYFMDMSDSEIADLLKLNRSTVYRHRTSGLALIKKFMEEFEE

SEQ ID NO: 1490 - protein, 41 aa, Streptococcus pneumoniae
LATLDCVQCIYNFFKLFSFNLNTIAIHNQPICIFIFLCQAS

SEQ ID NO: 1491 - protein, 320 aa, Streptococcus pneumoniae
MSEKRRDNKGRILKTGESQRKDGRYLYKYIDSFGEPQFVYSWKLVATDRVPAGKRDCISLREKIAELQKDIHDGIDVVGKKMTLCQLYAKQNAQRPKVRKNTETGRKYLMDILKKDKLGVRSIDSIKPSDAKEWAIRMSENGYAYQTINNYKRSLKASFYIAIQDDCVRKNPFDFQLKAVLDDDTVPKTVLTEEQEEKLLAFAKADKTYSKNYDEILILLKTGLRISEFGGLTLPDLDFENRLVNIDHQLLRDTEIGYYIETPKTKSGERQVPMVEEAYQAFKRVLANRKNDKRVEIDGYSDFLFLNRKNYPKVQVITTA

SEQ ID NO: 1492 - protein, 39 aa, Streptococcus pneumoniae
MGHANIAMTLNYYAHATFDSAMAEMKRLNKEKQQERLVA

SEQ ID NO: 1493 - protein, 195 aa, Streptococcus pneumoniae
MKRIIPVYIFQQVNVLLVSLYLLKLLCISELTILQILYCASLISFLWMYGQRKQVVKVNMKTRMKWLGIGFVSLLIINLCFSLIHAQGTTNQANLIGLQHQVPWFSFLLLLINASMVEEFLYREILWNLVRKLDIRVALTSILFVLAHHPGTILAWCLYVSLGMFLGLVRYKSDLWGSMGLHLVWNLSVYVLFFL

SEQ ID NO: 1494 - protein, 259 aa, Streptococcus pneumoniae
MKRITANQYQTSERYYKLPKILFEDEKYMDMKLEVKVAYSILKDRLELSLSRGWIDEEGAVYLVFSNSKLMKLLGCSKSKLLSIKKILKEYDLIDEVQQSSSEKGRLANKIYLGELSSTPVASSNRPSVKKKIGQVENETAPVSHSAPSETEVSETKYSETDSLFSEDEEERYTQPILKRKVEKVTKYDQDYIWGLVQDQFRREGFSETASEIAMTDFERIYQYALDNVRFVRRAEVLAEFVFNGLYSVWNNRVRKGGG

SEQ ID NO: 1495 - protein, 57 aa, Streptococcus pneumoniae
MTKELQSSRYIVISFLVREMGIDIVEAISLMAELEKSGLVRLESSGDLILKELGGAL

SEQ ID NO: 1496 - protein, 47 aa, Streptococcus pneumoniae
MIVILLSFFLQKIKKGEQYSTVLQNIFIKKKNPAKLIFGRVFGRKLN

SEQ ID NO: 1497 - protein, 74 aa, Streptococcus pneumoniae; identical to SEQ ID NO: 317

SEQ ID NO: 1498 - protein, 56 aa, Streptococcus pneumoniae
MVICHNDYLLWLPEFSQPLTSLSQTTFFNLNIIRMMRNIDSDFHRRISFSLLVFFC

SEQ ID NO: 1499 - protein, 50 aa, Streptococcus pneumoniae; identical to SEQ ID NO: 323

SEQ ID NO: 1500 - protein, 62 aa, Streptococcus pneumoniae
MFLHHLLQIKGGLGIQTSQGFVQNPNIRSRQECPNDKDFLTHSVRKSFNNLIAVFSKIKNVQ

SEQ ID NO: 1501 - protein, 63 aa, Streptococcus pneumoniae
MTNQAHNLSIFNLQIEITQGLFITIQLTNILKFNHGTTPIFICIIHRYTSTLIQKNQYFILSS

SEQ ID NO: 1502 - protein, 58 aa, Streptococcus pneumoniae; identical to SEQ ID NO: 324

SEQ ID NO: 1503 - protein, 103 aa, Streptococcus pneumoniae; identical to SEQ ID NO: 325

SEQ ID NO: 1504 - protein, 39 aa, Streptococcus pneumoniae; identical to SEQ ID NO: 326

SEQ ID NO: 1505 - protein, 45 aa, Streptococcus pneumoniae; identical to SEQ ID NO: 327

SEQ ID NO: 1506 - protein, 40 aa, Streptococcus pneumoniae; identical to SEQ ID NO: 328

SEQ ID NO: 1507 - protein, 134 aa, Streptococcus pneumoniae
MTIHIQVVKTNMVILADRFFQGLILRSTDKFFIKIRLVRSHNLRFNNMDFSTVAVHENKGRHHVDELLLRFIINSKATVAKKSIVAQGFRFDGNFFRKTRQTNHLNIIFYDNPDQIIFFQNGLITNSQFNRLHP

SEQ ID NO: 1508 - protein, 129 aa, Streptococcus pneumoniae; identical to SEQ ID NO: 332

SEQ ID NO: 1509 - protein, 49 aa, Streptococcus pneumoniae
MRFIVGRFTSFSLGIEFSPTSKLDDLLFKIAFLMILATWIKARKTKEAT

SEQ ID NO: 1510 - protein, 60 aa, Streptococcus pneumoniae; identical to SEQ ID NO: 334

SEQ ID NO: 1511 - protein, 37 aa, Streptococcus pneumoniae
LHYRTTPTLIMVVQRDCLILSFPRQKGPIVGQMAIIL

SEQ ID NO: 1512 - protein, 122 aa, Streptococcus pneumoniae
VFALLDNSTFLRKSLHLRKMEMFPVETEEITYKRKKSKGKRQAILAQFDSEEVHHQVEESICPDCQDDLKEIGASLQRQELVFIPAQLKRVDHIQHAYKCQTCSKNNPSDKIVKAPIPKAPL

SEQ ID NO: 1513 - protein, 101 aa, Streptococcus pneumoniae; identical to SEQ ID NO: 339

SEQ ID NO: 1514 - protein, 65 aa, Streptococcus pneumoniae
VGHNSGSFFLFLLLRLLLSPLLRNSISFLTSQGIPWKLSNNKTKPIDKPTASKSIATNPLLLHLR

SEQ ID NO: 1515 - protein, 62 aa, Streptococcus pneumoniae
LDFLNHLWVAHAGNSSSCTNISRNSFQGHHSCRTSSFCDTSLFRILHIHNNTTLEHLCQVFI

SEQ ID NO: 1516 - protein, 37 aa, Streptococcus pneumoniae; identical to SEQ ID NO: 346

SEQ ID NO: 1517 - protein, 37 aa, Streptococcus pneumoniae
MGFSMKLIHDLNTHTTHSTAKMLHNVKAIKNDFSIRE

SEQ ID NO: 1518 - protein, 317 aa, Streptococcus pneumoniae
MQEHYTPKGKHLTIDNRRLIERWKNENKSNREIAGLLGKAPQTIHTEVKRGTTLQQVRKGLYKKVYSADYAQTVYQFNRKRSVKKLILTKEIREKILHYHKQKFSPEMMVNKKQVKVGISTIYYWFHNGHLGLTKADMLYPRKRKGVKKQASPNFKPAGKSIEERPDVINLRLENGHYEIDTVLLTKIKNYCLLVLTDRRSRHQIIRLIPNKTAESVNQALTLLLGEHRILSITADNGSEFKRLSEVFPEEHIYYAHAYSSWERGSNENHNRLIRRWLPKGTKKTTPKEVAFIENWINNYPKKCLDYKSPSEFLLGG

SEQ ID NO: 1519 - protein, 60 aa, Streptococcus pneumoniae
VVPRYVTKHQGWDHNSHTITNSDDDPATLVTFRTFKFNVGNCTIPKNDQNGSSQKFSGIL

SEQ ID NO: 1520 - protein, 47 aa, Streptococcus pneumoniae
MAYSTDFKQRALDYIKEGHSHVEAAKFFGVGVRTLFTWEKKDVNKDT

SEQ ID NO: 1521 - protein, 58 aa, Streptococcus pneumoniae; identical to SEQ ID NO: 352

SEQ ID NO: 1522 - protein, 38 aa, Streptococcus pneumoniae; identical to SEQ ID NO: 354

SEQ ID NO: 1523 - protein, 560 aa, Streptococcus pneumoniae
MKLKLLRVDTKVIMGSFLLVLSSLLALLLPLILKGLIDGSSIENIGSKVFQSFLIFIGQALFSSIGYYLFSQSGEKKIAKIRKKVIEGLIYAEKSFFDKSQSGELTSAIVNDMSVIREFLITTFPNIILSLVMVLGSIVVLFSLDWNLSLLLFITLPCMMFIILPLSNISEKYSRRLQEEIGFLTGQLTEKIQEHELIKTNQAEKSVQDVLDNCIERVQNNSLKSDRVTSFETPFALLFIFATIVVMLTYGGYRVSAGYISVGTLVSFLIYLFQLLNPISNIANFVTIYSSSKGSSVALENLLAVPKEKFEGGKSVSGQGLNFNHVYFGYDENRPVLKDITCSIFKGQKIAFVGPSGSGKSTIVRLLERFYKPLSGDILMEQSSIYDFNLKEWRSKIAWVSQNNAVLSGSIRDNLCLGLNRLVTDDELMKVLDLVSLGDEIRSMKEGLDTEVGERGRLLSGGRSQRLQIARAYLKDAEILIFDEATANLDADSEYAIISSLYSVLKEKTVVIIAHRLSTVKDVDCIFFLEEGKITGSGTHKELLENHERYARFVQEQMIE

SEQ ID NO: 1524 - protein, 198 aa, Streptococcus pneumoniae
LIRYLDQYEDVILREIKAQFPDVAVDKLMEEYIKAGLILRENKRYYLNFPTLESLDSLELDQEIFVREASPVYQALLEQSFETELRNQINAAILVEKTDFARIKMTLSNYFYKVKQQYPLTEKQQELYDILGDVNPEYALKYMTAFLLKFLKKDQLMQKCRDIFVDSLVVLGYIVQNEDGKYELAIDFDKERLTFYLA

SEQ ID NO: 1525 - protein, 46 aa, Streptococcus pneumoniae; identical to SEQ ID NO: 359

SEQ ID NO: 1526 - protein, 55 aa, Streptococcus pneumoniae; identical to SEQ ID NO: 361

SEQ ID NO: 1527 - protein, 121 aa, Streptococcus pneumoniae
MIDHFEIKVKDLQISEGFYRSFLAPLDYKLAFKTSSLISFLSPNSPHPGGDFWLTQGTQDPVHFAFLAENKEEVQACYEAGLEAGGRDNGAPGYRSEHPIYYAAFMIDLDGNNIEVVCHKE

SEQ ID NO: 1528 - protein, 58 aa, Streptococcus pneumoniae; identical to SEQ ID NO: 363

SEQ ID NO: 1529 - protein, 40 aa, Streptococcus pneumoniae
LSNQFYFSLQTKPILKVKQFLLFQSQMIRVSEILQFSNKL

SEQ ID NO: 1530 - protein, 1774 aa, Streptococcus pneumoniae
MKHSHKKSFDWYSMQQRYSIRKYYFGAVSVLLGTALVLGAAASVQTVQAEENKQETTNSISVGRGEAATKPAEVSASNKEKTYAAPTVANPVETTPVKTGEVTKPAEKVEEAKDKKEEVTHQDAIDKSKLLTALSRAKKLESKLYTEASAANLQTSIQAGQSLLGKADASEAELSAAESSIQSSIIGLELRSNSNKGTVSETPVAKKANIVEAKEETKPAVTTTERSAVDSAILPISTAAKVETTSAPASTNEILKPSLSLSDARQNPAIRKEDVDRGYSGFRTAGSGFRAAGSGFRAAGPENKPILNPNNTIAFSDISQGLHSFRGIGHSRGGREIHYDVTTVRRGNRLNFTIKYSGPGEFVNNNFILDKGDGFGNPSNATITSSNPRVREQSKSISQGANYVSHSGYSMTSATSTNTEQTIRFSLPIINPNGDLSVRLKPVTFNVDQGGGGAATSNDPYSNSNYYHRANPLLLDANPYGGTNNKTVSEDIDFQTVYLPTSKLPEGQTRLVREGEKGQRQITYKVHRFGNETLLGLPISNRVTKEAKPRIMQIGVAKELIDTVKPRVDQNKVGDTNNLTFYLDNDGNGVYTEGVDELVQKIAIKDGAKGEKGDQGERGLTGAQGTKGEKGDQGERGLTGAQGAKGEKGEQGFQGRDGEQGPKGEDGKTPTVKVTDGQDGTHTITINDGKGGITTTVVRDGFDGASPLVSTHRNEADKTTTVIFYYDLNDNNQFDEGDTKLKEVVIADGKQGPKGDKGDNGKDGFTPEVTVTDNNNGTHTITITQPDNRPSLTTIVKNGEDGKTPKVKAERDDAKKQTTLTFYIDKDGDGSYTAGKDELVQTTVVKDGQDGAAGASGRDGKEVLNGKADPTTEGKDGDTFVNTQTGDVFVKKGNTWEPAGNIKGPKGDKGADGAKGEKGDRGERGLTGAQGTKGEKGDQGERGLTGAQGTKGEKGDRGERGLTGAQGQAGRDAVTPTVTVKDNKNDGTHTITINDGRGNVASTVVRDGFDGASPLVATQRNEADKTTTVIFYYDQNGNNELDASDKKLKEVIIADGAKGEQGLQGRDGQDGAQGQAGRDGKDVLNGKANPEVNQGKDGDKYVNTETGDVFVKNNGNWDKEGNIKGPKGDKGERGEDGKTPEVTVTPGKDGHSTDITFTVPGKDPVTFTVKDGKNGKDGRAPKIKVEDITSPSRIRRDTDAAATPTRNGIRVTVYDDVNDNGVYDEGVDKVLNSKDIYNGIDGRDGSAPTITTKDNGDGTHTITVQNPDSSESTTVVKDGKDGKTANITTTENPDGSHTITVTNPDGSTKETVVKNGKDGKTPKVEVTDNNDGTHTVKVTDGDGNVTNAIIKDGKDGKAATATTTENPDGSHTVTITNPDGTKNEFVVKNGRDGVDGRTPTASVRDNGDGSHTIVITNPEGVTTETTVRDGKSPKVTITDEQNGTHKISVLNGDGTTTETIIKDGKSPVATVRDNQDGTYTIRVENGNGTVSETTVRDGKSPTAKVVDNGDGTHTITVVNSDGTTTTTTVRDGREPKLEVIDNNDGSHTIKVTGADGKGTTTTIFDGKSPKANIVDNGDGTHTLTIVDSDGREYKSIIKDGKDGKDSVSPTVTVKNNNDGTHVVTITNPDGSKTEMVIKDGKDGKCGCQDKPVTPSNDKPVPPTPNVPTPEVPVKPVPAQPTPNVPTPEVPVQPTPAVPTPEVPVKPVPAVPEQPVVPTPAQPATPVNANPVAPTTGKENRGDKLPETGSQSDYISVLLGSGILLSLYVGRRKED

SEQ ID NO: 1531 - protein, 494 aa, Streptococcus pneumoniae
MRNLLSTKVQRQLRLMETLIQNRNWMKLHELAEKLGCTERILKSDLNELRIAFPSINIQSSVNGIMIDLEVNTSVEDIYQYFLANSQSFQLLEYMFFNEGLPIYRTIENLYFSSANLYRLGRNITKVLSSQFQIELSFTPSEIRGNEIDIRYFFAQYFSERYYFLDWPFPDLPEEDLTEFADFFYKITNYPMRFSIYRMYKLMIAISIHRVKNGHFIDLPNHFYKEYYPLLKSIPNFQETLAYFSKHFGLEMTPDTIAQIFISFLQNDIFLDPQEFFNSLEDNSQARYSYQLLSQILERLSKQYKITFTNHDELIWHLHNTAFFERQEIFSTPILFEQKALTIKKFEVYFPDFMGSARQELAQYRQAIGQHDHPEQLEHLMYTILTHAENLSTQLLENRPPIKVLIISNFDHAISLTFVDMLSYYCNNRFTFDIWDELKTSPEILNQTDYDIIVSNFYISGITKKFICRNHLSIMNLVNHLNTLSNEIHLSNTL

SEQ ID NO: 1532 - protein, 52 aa, Streptococcus pneumoniae
MIFKIGLFYLGQFVSLDMTVHKPIKKLQGWVVLSSLPFQSLDILTFFRSLLS

SEQ ID NO: 1533 - protein, 54 aa, Streptococcus pneumoniae
MGFYLMVASMLLGLLALKIGFSQFKENKDKFLSILTSLAGLALVLVAVWLGWPK

SEQ ID NO: 1534 - protein, 54 aa, Streptococcus pneumoniae; identical to SEQ ID NO: 367

SEQ ID NO: 1535 - protein, 43 aa, Streptococcus pneumoniae
MAFNQFNRCITLSIPTAPNIPTSVVHRTYLHDATVPNNVREKT

SEQ ID NO: 1536 - protein, 110 aa, Streptococcus pneumoniae
MQQITEIIIAFATSFLTVAVGGIVKAVKDYLLRKGGEKAVIIAEILAKNAVHAVEQVASETGYKGEEKLEQARAKVRAELTKYNISMTDKDLDTFVESAVKQMNDAWKGR

SEQ ID NO: 1537 - protein, 138 aa, Streptococcus pneumoniae
MKIEFFNFLRSVIQTEDGLVLYALALIVSMEIIDFVTGTIAAIINPDIEYKSKIGINGLLRKISGVLLLMILIPASVLLPEKTGFAFLYSICLGYIAFTFQSLIENYRKLKGNVTLFQPIVKVFQRLLEKDDDTKKGE

SEQ ID NO: 1538 - protein, 87 aa, Streptococcus pneumoniae
MLKVTKTRQLVTEFFAQDGDQQKLVKTTVINTDNKAVSTISETLHDPDLYANNRISMRKHEQELREMRYKIEDAILAELEADSEHKE

SEQ ID NO: 1539 - protein, 692 aa, Streptococcus pneumoniae
MTKFINSSGSLHLNIYIEQVSQDIANNSSRVSWKATVDRDGAYRTYTYGNISNLSVWLNGSSVHSSHPNFDTSGQEFTLASGEVTIPHSGDGTKTFAVWASFDPNNGVHGNITVSANYTLSSIPRSSSVSDNALSGNRRLGSPHTLTIDRKSSSFTHQVWYRVFGSNWIDLGKNHATGVSFVPNIDLARYNTKAKSGTMDICVRTYNGTTQVGNDVYSNGWYFEIPESVKPTFSGITLTDMNTVARQLLSGNNFLQIISDIQVNFNNPSGAYGSTITGYRAEIVNKNQVTTVNGGRLGMMNFNGSATIRASVVDSRGRQSDTRDITINVIEYFAPAFSFTAFRTRETPNIIQVVRNAKIAPITLSGSQKNVMTLSFKVARLGSTTFTADHGRASGIWTTQHTLNNSAANMAGNYVATKSFVVIGTLSDKFTSTEFTATVATESVVMSYDKDGRVGIGKVAEQGGAGSLDVLGDIYARNKPIQQYQLTDNNGCGKLIKQDFNTMKETGTWWINGSSQNNPFSGTWGMLEVFRPNPGSHERIQRFTTSTGYMAVRENGYDNNWRPWRYLVQQSKSTNNSDYVALLKSESTPTPWQNAILQNGWNHHRDYGGVQFSKTFDGVVCFKGTCKGGKIARESIILTLPEHFRPSTTLFKTALNNDYGSAVIGIYPNGNVVVKSNVDATWLNFDNVFFKI

SEQ ID NO: 1540 - protein, 1675 aa, Streptococcus pneumoniae
MLLTIHDANLQKVAFIDNEKQGTLNYYDDTWTRSLATGSSTFEFTVFKKAVKSDLPLAKAYHHLNEHAFVSFKYKGKSFVFNIIIVEENEQTIKCYCENLNLELINELANPYKSNKAMTFKEYCEAMDLLNYTHLSIGINEISDYKRTLEWEGQETKLARLLSLAKRFDAEIEFDTQLNADSTIKKFSVNVYHENDDNHQGVGRVRNDVIVKYGKNIHSITRKVDKTGIFNTIRPTGKMPTVEEELSGDKGSKSETVKNADGSTTKTTISTASDGTKSKTIVHTKVTKLADKTRITTTTTTRSDGSIEQTVTTSKKGGASTSETKVLKKPNPKEKTNTTEDVLTIEGLDEWEVKNEKGIVEFYQRGQALYAPISMQLYPSTFTHSTGELDQWTRKDFHFETDEPNELRRLGYLKLKKYCYPAITYEVDGFVDADIGDTVKVHDDGFAPLLMIQARVTDQKISFTNPVRNKTIFDNFKALENKLSADIQSAFERLFEAAKPYTIKLSTDNGVIFKNQIGQSLVTPTLYKGGKPVVVGVTWRWALDGEVTTGMTYLVRGSNVTDTVTLTVAAYIGNKEVAVDEISLVNVADGKLGTPGTPGRDGRTPYVHTAWANNATGTDGFSLDSSINKLYIGIYTDFEPNDSTDPKKYKWAKVKGEKGEKGDKGEPGQRGLDGLQGARGEQGLPGRNGADGRTQYTHIAYSNSADGTKDFSVSASDRAYIGMYVDFNRADSNTPSDYNWTLVKGSDGANGVAGKAGTDGRTPYLHIAYATSNNGSQGFSTTDSTNKTYIGTYTDYTQADSTDYRVYKWTLIKGADGTGISNVTNYYLATTVSTGITRTSAGWTTTPQPITSDKRYLWNYRVELYTNGTSKTTEPTVIGVHGEKGERGLQGLQGLQGARGEQGIPGPRGADGRTQYTHMAYADNATGGGFSQTNTDKAFVGVYIDFNPTDSRNPADYRWTRWKGRDGANGVAGRAGADGRTPYLHIAYATSNNGSQGFSTTDSTNKTYIGTYTDYTQADSTDPKKYKWAKVKGDKGEKGDKGERGLQGLQGLQGARGEQGIPGPRGADGRTQYTHMAYADNATGGGFSQTNTDKAFVGVYIDFNPTDSRNPADYRWTRWKGRDGANGVAGRAGADGRTPYLHIAYATSNNGSQGFSTTDSTNKTYIGTYTDYTQADSTDPKKYKWAKVKGDKGEKGDKGERGLQGLQGLQGARGEQGIPGPRGADGRTQYTHMAYADNATGGGFSQTNTDKAFVGVYIDFNPTDSRNPADYRWTRWKGRDGANGVAGRAGADGRTPYVHFAYSENADGSGLTMTDNGQRYFGHYSDYEKPDSSDKTKYKWADRWAKVDGGYVNIYALSKNRSIGKSYHVSEFNMDVLSGNITLKAIGSDPYIGAVSSHPGIFIKQQGMKIPVIQGRSICITITNPLFRKNYISFFNSLGKTVKTYKHYNTNKFLISSADLVGVEFIALRYGAGSSNIQIGTVLETKVKVEYGTVHSDWSPAPEDIESNINSKADQGLTQEQLNALNEKSQILEAEMKAKASMEAFSELEKAYNAFVKSNADSRKKSESDLVEAGRRIDLLTTQFGGLAELKTFIDTYMKSTNEGLIIGKNDASSTIKVSSDRISMFSAGKEVMYISQGVINIDNGIFTASIQIGRFRTEQYHLNKDVNVIRYIGG

SEQ ID NO: 1541 - protein, 504 aa, Streptococcus pneumoniae
MTKIMTFNGVDMSKFFRITDIIRPIGNKRSVSTDNAPLLGVNIQQVKIGEKEHIIKFDIKTTNAIEMEQLKHDLAGILNVLEPVKITYGDEPDKYYMGLPVDEITPENLTRWFQRSELKIIIPDGVAHSTTLKNFDIDTNETSAPDRIVFNLTNTGTEPAYPIIRIKHNSENGYIGVVNNRAAFELGNREEADTEKYRDSETLIDYRGTNILKGFQNGTKGVAVTNDNKERLVGTLSTTSMWGRNHIELSNRGTVEKNRNNAQSLTWAIPVDSSGEVGSLNDYLLWRQVFMAAVANQYGFIKVTVSDTDGNFLYGVETYKRYQTLDCEYSFFTTDGKGGYKFIKWWYFTGTGAQVGKLDPFSAEKGWSELKRNDDRVQVFFDGSHYDFIIPEIKDKKSAKIHITLGALRDWPLVSHMYVDEFMYRKDFVTKSRDIPNRYPIGSNVVINSEDDSVYIDGISKVSEVVDGSHWPAIPPGKSQLELYFSRFVKKKPTVTIEFEERWI

SEQ ID NO: 1542 - protein, 1093 aa, Streptococcus pneumoniae
MADGKVTIVVDVDGNKVKVLNDELDKAAQKGDRGSDSLKKFAIGGAAFKLASKAVDLLTDSLGGAIQRFDTLESYPRVMQAMGHSTEDVTRSTKKLAAGIEGLPTTLNEVVGTAQRLTSITGDINKSTDLTLALNNAFLASGSSSADASRGLQQFSQMLSAGKVDMQSWKTLQETMPYALQKTADSFGFAGQSAQNDFYSALKEGRITFNQFSKKLVELNGGVGGFAELAKSNSKGIQTSFGNLKNAVVKGVANTIKALDDLTKAATGKTIAENFDALKVIINAAFGVIVNVIKASTPVFQTLFSILGTGASVISSLTPVIISLVSALVAMRAANEAITATKNLINSWQTFKTTATGAIQIINLMTAAQATCGSVTKAQLVANLANNGALTASNLLYGVLTGSISLQTAATIAATAATTAFKAALTALTGPIGLVVAGVGLAVGALVGLWQWLTAESEETKRLKSEQEELVKSTDQLTDSVKQSAKERQKNLESVKGNTESYQKLADEIVQLSQKTNKTAADKKNLKKKIDALNASVSGLNLVYDKNTDSLSHNNDQIKARISAMEAESTWETSQKNLLDIEQKRAEIGEQLKQIAEQRKKWNEESNVSDSVRKERLQELNDKETELKNTQTELQTEYEKTSQVQQAASEAMAAAAENGSNRQVISYEGMSKAQQKAVDDMRSKYNELLETTTNMFDQIQMKSAISVDEMIANLQKNQEAVNNWATNLNTLAERGVNEGILAKLQAMGPQGGLYVQELVNASDEKLATLNEVFTQGGESAMNGLTAGMDTGALGITDKIKGIVQSQVSSLQEEIAAADFPEKGKNIPEGVGDGIKAGAEIASEASKNMANDIKESFTSEMDINSPSRVFNEYGGFITTGLAEGVDKGTNQPVSSVTNLANQIKKPFDSLQSDFTYIGEMAMSGLNAGLWSGSGSVMATANSIAERVKATIKSALDIHSPSRAMRDEVGRFIPQGIAVGIEADAGVVEKSMLRLKESMMIDTRPEIALGLNKKLGAQVTVKQSSKQTIAEKIKVTMDKSSELLEKALDVAETAVRRPNEMYLNDGTLVARTGDKFAKYQSEQLRRDNRMKGVLS

SEQ ID NO: 1543 - protein, 189 aa, Streptococcus pneumoniae
MSMKLNDALITNFSIADKEYDIDLSFNKVLDVFEILKEDEMTRLEQAQLIVHLLTGQELYDIKEVVDCWIYIKEHFLGIEKETVQYDLLGNPMPKAKGEEEQEKLIDFEQDAEYIYASFLQAYGINLLKVQNELTWTEFKALLNALPDNTIMQQIIEIRAWKPEYGGDKNKMRKLQAKYSLGKEGEDNG

SEQ ID NO: 1544 - protein, 162 aa, Streptococcus pneumoniae
MTDIQIELKRTGFPVKIGEVELWFDTSQESLMCFYDMEEELKRRLVQYELDVVSANINNKIERDGVTKEVVAGAIELEKKQLEIQYDLIFGDGTFDKLYSIYPDYNALNNALEQTAIMLHDKLEEVAEQHKTVVKERASHYLNKGKVTPIKNNKKQKKNKKK

SEQ ID NO: 1545 - protein, 149 aa, Streptococcus pneumoniae
MTRQKNALRGHFVAPYNGGTEPSTEDTWLELAKWISDVSDDTDEKTDDQAYYDGDGVEETTVVSVKGAYTFEGTYDPDDKAQALIAGMKYKTGDDRKLWHKVVSSDRKKQWVGAATATEIKAGSGAASDYEAFGCKLSYNSTPKETGIG

SEQ ID NO: 1546 - protein, 135 aa, Streptococcus pneumoniae
MRENDFQNVLLKHIKTLNLPVEPRFDYFEDDKDDLVINQIPGGKVDREYMDGTQEVSLPFEIAVKAKKNSVANDTIWLVTSELAKIDLVLPSDNNSYEYMGMEVSRPAMKGKDEQGYYYYTIEIVAKIVIERNKQ

SEQ ID NO: 1547 - protein, 114 aa, Streptococcus pneumoniae
MNIAIKVDLQKAKQKLSNESMTRGKIAVASKILLDNEQYIPLRGGELRASGRIVGQGDAVVYGTVYARAQFYGSNGIVTFRRYTTPGTGKRWDQVATSKHAEEWARAFVKGMGL

SEQ ID NO: 1548 - protein, 130 aa, Streptococcus pneumoniae
MTYLTQEEFDELDFDEVTDFEKLAKRAKIAIDLYTNGIYQKDIDFEKEIAYRKSAVKLAMAFQIAYLDASGIMSADDKQLANSVSIGRTSISYSTSQSTLAGQRFNLSMDAENALRQAGFSLVVGVAYDR

SEQ ID NO: 1549 - protein, 77 aa, Streptococcus pneumoniae
MALYKATKNLFFEQLNMDVIVDDIIELDEDYAKEVNKKLKNAFPDVKNVLELVDKNGTLEPEDAPSVDDASQATVED

SEQ ID NO: 1550 - protein, 293 aa, Streptococcus pneumoniae
MPSNQNNAVRRYEKQYAGILETVFGVRAAFSNALAPIQILDGVQENSKAFSVKTNNTPVVIGEYKTGENDGGFGDNSGAQSRFGGVTEVKYENTDVNYDYTLTIHEGLDRYTVNNDLNAAVADRLKLQSEAQTRTVNKRIGKYLSDNATKTEALADFTDDKVKALFNKLSAFYTNNEVTAPITVYLRSEFYNAIVDMASVTSAKGATISLDENGLPKYKGFTLEETPAQYFETGVIAIFSPNGIIIPFVGISTARVIEAENFDGVKLQAAAKGGTYTLDDNKKAIYKVTGTIV

SEQ ID NO: 1551 - protein, 187 aa, Streptococcus pneumoniae
MAFTTEELLNLGLTEEQAKSVFALRGKELNEDKSALETIKQERDSLKSQLQKAEEQVEHLKSLENISAEQKDAIDKLQAEYDKYKNEAAAELAQTKKVSAISLALKDTNAFNPDKLMKFIDVDAIQLDDNGKPQIDEVINGLKESDPYLFKAEESKPSPNILPQGNPAGEGTSDVDPFQAIIDGYGK

SEQ ID NO: 1552 - protein, 383 aa, Streptococcus pneumoniae
MKKKRKQITFNDQQFPLQMQGVGDIYEKLQIDIFDRMIKRLKERGSIDLMRNPYIWQLEKLNDMHMLNEQNLKLISERTGIAERLLRDVIENEGLKVYKDTKQQLEEDLNKIPEGEISNGVTDSLEAYSRQAVSDLNLINTTLPKSLQVAYKSIVEETVAQVVAGTKTSDVALHDTIMKWQKNAFTGFVDKGGRHWKADSYARAIIKSTTYKVYNEMRTRPAEELGVDTFYYSMKAMARPACSPLQGQIVTKGTGREIDGITIYSLLDYGYGTAAGCLGIHCGHYLTPFIVGVHELPNLPDYLKNLTPEQAEENARIEAGQRGLERLIKTHKERLHYAHTLQDDKMIQAERLKVRGYQTKIRNLINQHDFLTRDYRREKLYIS

SEQ ID NO: 1553 - protein, 522 aa, Streptococcus pneumoniae
MSLFQKVKDFFSRGRYYMQTSNLNSILEHPKIAVTQEEYDRIKRNLVYYQSKWDDVQYKNTDGDIKSRPMNHLPIARTASKKIASLVYNEQATITTKNEILQKFLDDMLTNDRFNKNFERYLESCLALGGLAMRPYIDGDKVRVAFIQAPVFFPLESNTQDVSSAAILTKTIKSEGRKNVYYTLVEFHEWVTADGQETGSTNDKKYYRITNELYRSDVNDVLGQRVNLSELDKYKNLEPVTVFENLSRPLFTYLKTPGMNNKDINSPLGLSIFDNAKTTIDFINRSYDEFMWEVRMGQRRVIVPEHLTQRQYQRPDGTIDFRPRFDVEQNVYMQIGGSSMDAGGITDLTSPIRANDYILAISEGLKLFEMQIGVSSGMFTFDGQGMKTATEIVSENSDTYQMRSSIVALVEQSIKELCVSMCELGKAVGVYSGEIPELDDISVNLDDGVFTDRHAELDYWAKMVAAGFSTKKRAIGKTLNISGVEAEKELNAINSELLPMNDAELAIYGMHDQNEEKADDKG

SEQ ID NO: 1554 - protein, 436 aa, Streptococcus pneumoniae
MTFNVQKNINPHFKSVWISSLPYNVLKGGRNSFKSSVIVLKLAYMMIRYIIAGEAANIVVIRKVANTIRDSVFNKVWWALNLFGIAEQFTKTVSPFKIVHKTTGSTFYFYGQDDFQKLKSNDIGNIIAVWYEEAAEFNDQEDFDQSNVTFMRQKHPRAKFVQFFWSYNPPRNPYSWINEWFESIKTNKNYLAHSSTYLDDELGFVTEQMLEDIERIKENDYDYYRYLYLGEAVGLGNNVYNMSMFHAIDALPSDDKLIGISFALDGGHQQSATACCAFGITAKGKVILLDTWYYSPAGQVVKKAPSQLSKEIYAYMRSVIEKYRVQALQYTIDSAEGALRNQMFLDFGLKWHPVAKLRKVTMIDSFQSLLAQGRFYYLNTENNKIFIEEHKMYRWDEKTIKSDNPSVIKEDDHTCDTTQYFVLDNAKLLGLRVGNV

SEQ ID NO: 1555 - protein, 151 aa, Streptococcus pneumoniae
LPRDGTKNLKPVTERTKDEARAISSKGGKASGIARRKKADLKKAFETLLSLDVTDSKIKKQLEEMGMAGNNEALLAFATFQQAVKGNQKATENIIKLTNTKDKYDIQEQKERIKALKYENRERAEAEKGSSETIEIVDAWAEDVRGATDDL

SEQ ID NO: 1556 - protein, 248 aa, Streptococcus pneumoniae
VAQKLTKLKDIFKHVSSIDLGKEILFEDLELYNKETETSKQYQSIEEAENDLYLMEKVNKINFTLGGGRGANFEKGKDGKYPGFRGAGGARDSGSSKALHPASLNNQGRFSSVEGAIQGFIKKHGGSRTEYSTAVDSQGFAHNYVHGGKNSVQILPISGGFTAIHNHPNGSNFSSTDLHSFAALKGMNTLVATNSSKAYRITKGANFDAKGFDKAVSKSRFTTKDYNKGADLWLKKNAKKYGYTYSYE

SEQ ID NO: 1557 - protein, 362 aa, Streptococcus pneumoniae
MLQIEYVDIKSIKPYHKNARHNDGEATEKVAASIKAFGFQQPILVDDNNIIITGHTRLKAALSLGIDTIPIAHAVNLTDEQIKAYRLADNRVAEYSTWDSELLNIELSQFETIDMAQFGFELSVTGFNFGNEEEQQEETENEEEDAEDFHRDTTINQYNLFNYDDTRVEGFYNMPKIEGVDHIPKDFQGFNYVLNKPDYSSCVHFFLDDYQFERIWQRPDFYIEKLLEFDSALAPDFSLYLDMPIAMQVWNIYRSRLIGQIMQDYGLTVIPTVSWASEESFDFCFDGLPKNSTLAISTIGVKQNKEQFEVWKNGVTEMIKRLTPKRIVVYGGKVEYDYKDIEVVYFENATTERMKESGTKTN

SEQ ID NO: 1558 - protein, 45 aa, Streptococcus pneumoniae
MNVIGACQKILFYSPTQAYVLLNAWFNDYFRATYTELLENAILDK

SEQ ID NO: 1559 - protein, 80 aa, Streptococcus pneumoniae
MNPEIIDNINKPSHYQGANGLEAIDVVHNFVGSLSGASAFFWGNAIKYMLRFQKKNGLEDLKKARKNLDWLIEEMDKEGR

SEQ ID NO: 1560 - protein, 119 aa, Streptococcus pneumoniae
MFFQDSEIEEFELNDTLRNDYITAYPDEIELMQSTGLKDKNGKEIFEGDIVRTTRFLGRADEIGGFYEYEKDYVGVVKVLEGSWVIDTGSVAVRLWSEIDESEVLGNIYENLEFLEVNE

SEQ ID NO: 1561 - protein, 57 aa, Streptococcus pneumoniae
MEDEQNILETQLILGKQVLEIVLDLLKDDSKIGVVLPLNINDREFTITVEKEVTDRD

SEQ ID NO: 1562 - protein, 95 aa, Streptococcus pneumoniae
MTQTLEEGMKNQSKCIKIPMEIRPFDVGYRIVNKHGQALALKNGASIFALPSLAEKAIKKEFGKNDPDFDIEKHFVEEVAIVNLSKFHSYFEEVE

SEQ ID NO: 1563 - protein, 165 aa, Streptococcus pneumoniae
MNIKALIKKYEELWNEHSPFYEPVPYTSMVELFLKELKQLDEPEKVKVPRFVAEWIEEARKACKDVVELFEFDFTNDEVRKWFMQERPFDLVARAWLDGYEVEEEKRYLVTLKNRQPLVKSQSGSTLYFSQDITARNYKGTQKELEDANFGWVFDCEGIEIEEVE

SEQ ID NO: 1564 - protein, 105 aa, Streptococcus pneumoniae
MMEELKQKVNEVYNWTVEDGKPQPPKQDLPQAVKERVDYFWEMAEDGMTFMGAMECIFADEKPTDYDLGATKDWLPKSKEFDDWIGYAPSMAQVVIAVYLIYRGN

SEQ ID NO: 1565 - protein, 68 aa, Streptococcus pneumoniae
VIEVNIKFDNFEAHGFYQDDTKLGKIRDAIISQMNNGHVVVLGEDRGILLNPKVIKSVQFKVVEDNQI

SEQ ID NO: 1566 - protein, 52 aa, Streptococcus pneumoniae
LYPTVKAIIDGMTDAGIWTDDNHKVIKKLSFVYGGLSEEKGHYRLEFDIEEV

SEQ ID NO: 1567 - protein, 245 aa, Streptococcus pneumoniae
MTTENLKSALEYAVELNEHGLEILTAADGTEYYDANKFNLKELDPKRYPKTLELSTLTSLVDYLKTDLNNLKNQRLIVAVEKNDEVCVWSENDEIEHRTLLVDVKARIPELSFGRFLSLEQFNIMLQSNFIDDNDRGTLLEFASALKIENGAEIEDNGVSQVATVKTGVASLAKGKAPNPVTLRPYRTFSEVEQPASLFVFRIDKQANMALFEADGKRWVADAVGNIASYLKEQLADQKHITVLA

SEQ ID NO: 1568 - protein, 144 aa, Streptococcus pneumoniae
MDKKLIGLDLTHIADGGLQEKLDKELEKVFDNILDLNTDAKAKRKVTITLTMSANEERTVVDTTMEVKSKFAPQNGVATTILIGRDFDTGQVHANELKSTVPGQMYFDENGEILTDIGQPVAEIEQQAETKSDIIDFNKKKVGN

SEQ ID NO: 1569 - protein, 369 aa, Streptococcus pneumoniae
MESAGHECIGFCEIDKFARASYKAIHDTKGEIELHDITTVSDDTIRGIGHVDVICGGFPCQAFSIAGNRRGFEDTRGTLFFEIARFASILKPRYLFLENVKGLLNHDRGNTFEVILSALDELGYDVEWQVLNSKNFGVPQNRERVFIIGHLRGGSGRKVFPLSGDGAAITCEQPKINKVGNTRKKGKSQSGDVVSIDSLAPTLCSTTTQKDPLKVLIENEIKQFGVLQPNYNQSGVVYEIDGISPTIRAYQGGNLEPKIRVKEATKQGYQEAEIGDSVNLSHPNSKTRRGRVGKQIANTLLTGESQGVVEPDFRIRKLTPRECWRLQGFPDWAFDKAQEVNSNSQLYKQAGNSVTVNVISAIAQGLGGN

SEQ ID NO: 1570 - protein, 181 aa, Streptococcus pneumoniae
MINNVVLVGRLTRDAELRYTQSNIAVATFTLAVNRPFKNEAGEREADFINCVIWRQLAENLANWAKKGSLIGVTGVIQTRSYDNQQGQRVYVTEVVASNFQLLESRNSQQNNQGHQDHHGGYQQQGYSNQGSSFQNGNSYGQQGSFVEGNTTNLVPDFTRDNNPFGRPTNPLDISDDDLPF

SEQ ID NO: 1571 - protein, 58 aa, Streptococcus pneumoniae
MRCFYVSGKIADLDLGSEINAENSFMAAIEFVKRYTDLLKFGSNEIKVSEVEEVQNDK

SEQ ID NO: 1572 - protein, 330 aa, Streptococcus pneumoniae
MVKDVTNSLTEIKVDFQPAVINVDREAIEAQVAAAIAQYSGREVTVDNYKEVYEERTRFNKLIGGLDTQRKDFNRQINEPAKDFDKWVKEKVIKPIEAVTDAMSAGLNAIDEHERLMRVDVVRATFEDKCMVAGIEKSTFADKYDEYSLKKYFKTGKYELKKTTLDEMDGLVLSEFDALEEYKANKQAIQEQAQEYDLPADSYIRHLEDGKSLVDILKMMKTDRDAEIARKEQKEIQEKAKAERLEEIAQSAKKNANANIKAYDAETGEILEQGTITPEPQNNAREVAKFEPSEPLVKLVRLELHGGLEQWENTQEYFEDNFIGFETLED

SEQ ID NO: 1573 - protein, 235 aa, Streptococcus pneumoniae
MADLTFAELQRKMQIEKQTKQGVKYPFRTAEDINNKFKSLDSGWSVSFPEDDIIQKGDKLYYKAVAVVKRESDGTIEKAIGWAREEDVPIFHTQKGDVKQMQDPQWTGAVGSYARKYALQGLFAIGGEDVDEYPVEESQEQGQNNQQQKPNNQQAQGQNQVRYIDNTQYQEINDLINDIAKIKGMPFDTLANYVLSEKLKGLQDFHRVQVGDYEVLKNYLTEQLAKAKAKAKRGN

SEQ ID NO: 1574 - protein, 150 aa, Streptococcus pneumoniae
MPNWAEGTLKLRGRRENVASALKEMLLGNKGATLEEEYDGTLLIFKNEYDYFYINGTRRAFISSKDIEIWLDDDFVIIELEDFEQAWAALADNYTEISSKFDVDIKIFTFEMGMEFTQEIEISKGEIIKNIVNENFTNYSWDVPFSRLGG

SEQ ID NO: 1575 - protein, 174 aa, Streptococcus pneumoniae
MKKIATAMNVSVSDLFTQDTPIKKNRHSTPVNPKIYKEFIDNVNQYQRLTGATYEKISNIIGKSNSYIYDVIDKQRKSTLSIKSNASLTKGSMILRQEIEKIESGKNRIPSKLTYQTIDRDSEVVFRFNGLIKSVNELSDKELQIIVSIFDALKIPAKISKIEIRETNVFGGGK

SEQ ID NO: 1576 - protein, 47 aa, Streptococcus pneumoniae
MKKLPSQQKYLRNDGQLVTIKGFDAYLQYRGSQSWKKEMAKTVKMTR

SEQ ID NO: 1577 - protein, 63 aa, Streptococcus pneumoniae
MPDITNGREKVNDFLKDKGIKKTSLAIAYGFKRQEVTNILSGTTKGPRANSFILQVIEDYGIE

SEQ ID NO: 1578 - protein, 120 aa, Streptococcus pneumoniae
MFETFEKIKSLAKKQGISLNTLEDRVGLGKNYIYSLKNKKTPSAEHISKIADYFNVSTDYLLGRTDNPTIANKKEQFFFEGKEVDVEELASTAMRFNGKPLTEEDKKAIQNIIEIYLRKQ

SEQ ID NO: 1579 - protein, 126 aa, Streptococcus pneumoniae
MTEKEFSQNLGIDIEIFEDGLFPDEAFYIPALKTMFLSDAISDEKRVQVALHEIGHRNHAPDTYQLFREKCELEANRNMIHHLMKAELDIAEDATTFNYLVFMEKYNLKTIADEIMVKEEYLALLN

SEQ ID NO: 1580 - protein, 116 aa, Streptococcus pneumoniae
MNIIAIIIIVIFVGGVIGAVIDNQKKSPEQRERELETFRANQEKKKQEKKQNIITCPNCKSKDVTFLQQDKKAFSVGKAVGGAVLTGGVGALAGFAGKKGNKQWHCQNCGNFFETK

SEQ ID NO: 1581 - protein, 375 aa, Streptococcus pneumoniae
MWMEELSNGKYKFFERYKDPYTEKLKKVSVTMEKKTPQARNQAAILLQEKINKKLSTKQVESITFEEIYNLFYKSWAQTVKESTKHNCKSVDKKMKEVIPSDTILANLDRRFLQEAIEKIIESNGYITAKKVRHRLRGIFNYAVQYSYIENNEVDYTTIPQKPKTLEELEKKRNNFLTMQEIKALVDVLNRREYHQKYADMVLVLTLTGMRYGELTALQLKNIDFENNKIEITGNFDSVNKIKTLPKTTNSIRTIKVSESVIEAIQRQIVRLSERFQPLSSDDYIFCFEKWNQPTTIACFIQILKKYGKQAKIEKNLSSHIFRHSHISFLAESGLPIKSIMDRVGHSNAKMTLEIYSHTTEDMEDKLVNKLDTIF

SEQ ID NO: 1582 - protein, 85 aa, Streptococcus pneumoniae
LHPFTRNITCDRYILALFSNLVNFIHVDNPTFCTLNVKVSSLQEFEEDIFHILTYITSLRQSCRIRNRKRYIQALSQGLSKESFP

SEQ ID NO: 1583 - protein, 51 aa, Streptococcus pneumoniae
MIINRHCQGTLGTILTDYIVVQDMEEFDWFWYLRQVCQDFLNQFFSNNFLS

SEQ ID NO: 1584 - protein, 490 aa, Streptococcus pneumoniae
LKTKIGLASICLLGLATSHVAANETEVAKTSQDTTTASSSSEQNQSSNKTQTSAEVQTNAAAHWDGDYYVKDDGSKAQSEWIFDNYYKAWFYINSDGRYSQNEWHGNYYLKSGGYMAQNEWIYDSNYKSWFYLKSDGAYAHQEWQLIGNKWYYFKKWGYMAKSQWQGSYFLNGQGAMMQNEWLYDPAYSAYFYLKSDGTYANQEWQKVGGKWYYFKKWGYMARNEWQGNYYLTGSGAMATDEVIMDGARYIFAASGELKEKKDLNVGWVHRDGKRYFFNNREEQVGTEHAKKIIDISEHNGRINDWKKVIDENEVDGVIVRLGYSGKEDKELAHNIKELNRLGIPYGVYLYTYAENETDAENDAKQTIELIKKYNMNLSYPIYYDVENWEYVNKSKRAPSDTDTWVKIINKYMDTMKQAGYQNVYVYSYRSLLQTRLKHPDILKHVNWVAAYTNALEWENPYYSGEKGWQYTSSEYMKGIQGRVDVSVWY

SEQ ID NO: 1585 - protein, 166 aa, Streptococcus pneumoniae
MHKNFVVVVTDFFTAVQFIQFNKEGTTCHNTTKFFNHLDSCLNSSTCRQKVIYNKNTLTWLNGIRVHSQGIDTVLFFIVSRNNFAWQFTWLTNRRKTNSQLKGNWTTHDKSTSFRSHDHVDFLVSSILNDFTNSVAISISISHQRTNITEGNAFLWIIFNCCNVIF

SEQ ID NO: 1586 - protein, 56 aa, Streptococcus pneumoniae
MEIKEQTRKLAVSYSKYSFEVADKTDEVSNHTYGKATLTWFEEIFEEYKEHHNIDV

SEQ ID NO: 1587 - protein, 40 aa, Streptococcus pneumoniae
LHKTLENIGEFEEDNLYYSSMTKAETRISFPIFSLILHYI

SEQ ID NO: 1588 - protein, 62 aa, Streptococcus pneumoniae; identical to SEQ ID NO: 372

SEQ ID NO: 1589 - protein, 58 aa, Streptococcus pneumoniae
LNSRFFYTDFFKGRQAKGCSFSCTSLSLTDNILAFKGQRNSLFLDRTSFYKTSFFNFC

SEQ ID NO: 1590 - protein, 46 aa, Streptococcus pneumoniae
MRFLADQDRIQHHRYSWALFDKVQGLLSHTDSREKTNLNSPKFHIT

SEQ ID NO: 1591 - protein, 40 aa, Streptococcus pneumoniae; identical to SEQ ID NO: 1114

SEQ ID NO: 1592 - protein, 89 aa, Streptococcus pneumoniae
VTAHRIFGTSSIHNKLIGLAMFGITAMKIICHKLNRNHINIFRRLGIQGKTEFLLIHLIRQVKMNDLSQGMNPTICPTSTVNSNGLPFI

SEQ ID NO: 1593 - protein, 38 aa, Streptococcus pneumoniae; identical to SEQ ID NO: 378

SEQ ID NO: 1594 - protein, 45 aa, Streptococcus pneumoniae; identical to SEQ ID NO: 379

SEQ ID NO: 1595 - protein, 42 aa, Streptococcus pneumoniae; identical to SEQ ID NO: 946

SEQ ID NO: 1596 - protein, 282 aa, Streptococcus pneumoniae; identical to SEQ ID NO: 390

SEQ ID NO: 1597 - protein, 38 aa, Streptococcus pneumoniae; identical to SEQ ID NO: 956

SEQ ID NO: 1598 - protein, 79 aa, Streptococcus pneumoniae; identical to SEQ ID NO: 957

SEQ ID NO: 1599 - protein, 44 aa, Streptococcus pneumoniae
LTKIFGWILRIAVLAADVYGNFANNIAVAWDAHDKIPNNGRINF

SEQ ID NO: 1600 - protein, 40 aa, Streptococcus pneumoniae; identical to SEQ ID NO: 396

SEQ ID NO: 1601 - protein, 980 aa, Streptococcus pneumoniae
MSYFRNRDIDIERISMNRSVQERKCRYSIRKLSVGAVSMIVGAVVFGTSPVLAQEGASEQPLANETQLSGESSTLTDTEKSQPSSETELSGNKQEQERKDKQEEKIPRDYYARDLENVETVIEKEDVETNASNGQRVDLSSELDKLKKLENATVHMEFKPDAKAPAFYNLFSVSSATKKDEYFTMAVYNNTATLEGRGSDGKQFYGNYNDAPLKVKPGQWNSVTFTVEKPTPELPKGRVRLYVNGVLSRTSLKSGNFIKDMPDVTHVQIGATKRANNTVWGSNLQIRNLTVYNRALTPEEVQKRSQLFKRSDLEKKLPEGAVLTEKTDIFESGRNGKPNKDGIKSYRIPALLKTDKGTLIAGADERRLHSSDWGDIGMVIRRSEDNGKTWGDRVTITNLRDNPKAFDPSIGSPVNIDMVLVQDPETKRIFSIYDMFPEGKGIFGMSSQKEEAYKKIDGKTYQILYREGEKGAYTIRENGTVYTPDGKATDYRVVVDPVKPAYSDKGDLYKGNQLLGNIYFTTNKTSPFRIAKDSYLWMSYSDDDGKTWSAPQDITPMVKADWMKFLGVGPGTGIVLRNGPHKGRILIPVYTTNNVSHLNGSQSSRVIYSDDHGKTWHAGEAVNDNRQVDGQKIHSSTMNNKRAQNTESTVVQLNNGDVKLFMRGLTGDLQVATSKDGGVTWEKDIKRYPQVKDVYVQMSAIHTMHNGKEYIILSNAGGPNRENGMVHLARVEENGELTWLKHNPIQKGEFAYNSLQELGNGEYGILYEHTEKGQNAYTLSFRKFNWEFLSKDLISPTEAKVKRTREMGKGEMGKGVIGLEFDSEVLVNKAPTLQLANGKTATFLTQYDSKTLLFAVDKEDIGQEIIGIAKGSIESMHNLPVNLAGARVPGGVNGSKAAVHEVPEFTGGVNGTEPAVHEIAEYKGSDSLVTLTTKEDYTYKAPLAQQALPETGNKESDLLASLGLTAFFLGLFTLGKKREQ

SEQ ID NO: 1602 - protein, 106 aa, Streptococcus pneumoniae
VDKTDKVSSKHRFEVADRTDEVSSKHRFEVADRTDEVSSKHRFEVADRTDEVSSKHRFEVADRTDEVSSKHRFEVADRTDEVSSKHRFEVADRTDEVSNIYTARRS

SEQ ID NO: 1603 - protein, 43 aa, Streptococcus pneumoniae; identical to SEQ ID NO: 399

SEQ ID NO: 1604 - protein, 62 aa, Streptococcus pneumoniae
MTVKHRIVNSNGEARSGESLTTCGTRSTHGNWATVGYVYAADMARQNWWDLSAAISGSWSPN

SEQ ID NO: 1605 - protein, 283 aa, Streptococcus pneumoniae
MRWDYGQIFKEIRKSKGLTQQDVCGQVIHRTTLTNIEHGKVIPSFENMVFLLEQIDMSLAEFKYICNEYHPSKRRDIIVESQNPSTFQDTRKMVELTEKCQKYLKTHHDVPIQNIYRHTKIVTELRTKGFKNNHVLKDLYEEIWDYLEPMDTWYISDLKLLGTILFFFPSENLPLLIDRIMKTIEKYKYFRETKAFLSSFLANLSTVYFQHHLFKECETITLQLLVLAEELKIYDILGFSQVRLGILQHNSDLIDKGITLLRLTKEEALVKILEKEINDFSNL

SEQ ID NO: 1606 - protein, 92 aa, Streptococcus pneumoniae; identical to SEQ ID NO: 400

SEQ ID NO: 1607 - protein, 78 aa, Streptococcus pneumoniae; identical to SEQ ID NO: 401

SEQ ID NO: 1608 - protein, 142 aa, Streptococcus pneumoniae; identical to SEQ ID NO: 969

SEQ ID NO: 1609 - protein, 50 aa, Streptococcus pneumoniae; identical to SEQ ID NO: 970

SEQ ID NO: 1610 - protein, 98 aa, Streptococcus pneumoniae; identical to SEQ ID NO: 971

SEQ ID NO: 1611 - protein, 38 aa, Streptococcus pneumoniae
LIKLTDRNFSDILIKCLIKCFTNLLSNQLMLLPSTLKL

SEQ ID NO: 1612 - protein, 37 aa, Streptococcus pneumoniae
LFKGGVTISRTPLSSEDTVMIDATEVQINCPKKTISE

SEQ ID NO: 1613 - protein, 69 aa, Streptococcus pneumoniae; identical to SEQ ID NO: 409

SEQ ID NO: 1614 - protein, 58 aa, Streptococcus pneumoniae; identical to SEQ ID NO: 410

SEQ ID NO: 1615 - protein, 42 aa, Streptococcus pneumoniae; identical to SEQ ID NO: 975

SEQ ID NO: 1616 - protein, 70 aa, Streptococcus pneumoniae; identical to SEQ ID NO: 976

SEQ ID NO: 1617 - protein, 56 aa, Streptococcus pneumoniae; identical to SEQ ID NO: 413

SEQ ID NO: 1618 - protein, 56 aa, Streptococcus pneumoniae; identical to SEQ ID NO: 978

SEQ ID NO: 1619 - protein, 56 aa, Streptococcus pneumoniae; identical to SEQ ID NO: 415

SEQ ID NO: 1620 - protein, 39 aa, Streptococcus pneumoniae; identical to SEQ ID NO: 416

SEQ ID NO: 1621 - protein, 55 aa, Streptococcus pneumoniae; identical to SEQ ID NO: 981

SEQ ID NO: 1622 - protein, 134 aa, Streptococcus pneumoniae; identical to SEQ ID NO: 982

SEQ ID NO: 1623 - protein, 252 aa, Streptococcus pneumoniae
MKFKNYLFDLYPYFPKGFSLDNREDPDVCSKALYDDLCKMFFDDDSKEKLKITSVCNKCQNYGNRDYYTLFIDKDKYLLSSDYIGASIYWAQEAGLNDRIILDHLSISRTIGGHILFPRGGKLETVNQARGGEKGYYDRFDLTLYAIKEWFVENKNTKIGYAIENYHEWFELFSGDDNCKNGFENFVEFFKLEGFIYEQNKIIDLIKSDLENNQVVFLDKEDILIASTEEEYIRYMKNLNIIILERTKKILL

SEQ ID NO: 1624 - protein, 37 aa, Streptococcus pneumoniae
MELSIQLIHDLNTHTTHSTAKMLHNVKAIKNDFSIRE

SEQ ID NO: 1625 - protein, 99 aa, Streptococcus pneumoniae
LKAKLFSQVIVRAKHIHSNNFDATSDSSIVAKKVISNDSLFSSLKNSDDIEIVKILRNEAHLSLCKSILIPRHNLRKTRKIMFKVKIKEQTRKLAAGCT

SEQ ID NO: 1626 - protein, 59 aa, Streptococcus pneumoniae
VGCSYICHELVANHDHFLFVIVEFLHGTVNTKCEGLQGPVNVINPKFLNCSLNAFFGVI

SEQ ID NO: 1627 - protein, 58 aa, Streptococcus pneumoniae
LLHLWRSIRVVPSNEGIIQIDQNSLDSLRLQAWDCQIIDCFHSKIWYIIFNRHSGSFS

SEQ ID NO: 1628 - protein, 78 aa, Streptococcus pneumoniae; identical to SEQ ID NO: 423

SEQ ID NO: 1629 - protein, 62 aa, Streptococcus pneumoniae; identical to SEQ ID NO: 424

SEQ ID NO: 1630 - protein, 319 aa, Streptococcus pneumoniae
MIGTFAAALVAVLASFIVPIEITLNSANTEIAPPDGIGQVLSNLLLKLVDSPVNALLTANYIGILSWAVIFGIAMREASKNSKELLKTIADVTSKIVEWIINLTPFGILGLVFKTISDKGVGSLANYGILLVLLVTTMLFVAPVVNPLIAFFFMRRNPYPLVWNCLRVSGVTAFFTRSSAANIPVNMKLCHDLGLNPDTYSVSIPLGSTINMAGVAITINLLTLVTVNTLGIPVDFATAFVLSVVAAISACGASGIAGGSLLLIPVACSLFGISNDIAIQIVGVGFVIGVIQDSCETALNSSTDVLFTAVAEYAATRKK

SEQ ID NO: 1631 - protein, 200 aa, Streptococcus pneumoniae
MKIKEQTRKLAAGCSKHGFEVVDRTDEVSSKHRFEVVDRTDEVSSKHRFEVVDRTDEVSSKHCFEVVDRTDEVSSKHCFEVVDRTDEVSSKHGFEVVDRTDEVSSKHGFEVVDRTDEVSSKHSFEVVDRTDEVSSKHGFEVVDRTDEVSSKHGFEVVDRTDEVSSKHGFEVVDRTDEVSSKHSFEVVDRTDEVSNIYTAR

SEQ ID NO: 1632 - protein, 294 aa, Streptococcus pneumoniae
MKDLISVIVPVYNVEPFISSCLDSLSKQIYQNFEVLLVNDGSTDNSGAICREYADRDSRFHYFEKENAGVADARNFGIERSKGDYITFVDSDDWVTEEYLSILIETLKEQHSEIVVSTYSTYNESDGLFYIHVFDSDYYVKNYNSKLLMEELPLLERYDMSFLTSWGILFKRELFQEVQFPFGRVCEYIGTNYKLFMQVEKVTYINKVLYWYRVGKEGLSNSYSPKMMRDDCDFRLERIAVLALKGYDVSKYLDQMKFYLKYRHDIAIQRELKENVETRHLEMLDYLLNGNKYN

SEQ ID NO: 1633 - protein, 213 aa, Streptococcus pneumoniae
LNVRGGAYITFVDSDDWLEHDALDRLYGALKKENADISIGRYNSYDETRYVYMTYVTDPDDSLEVIEGKAIMDREGVEEVRNGNWTVAVLKLFKRELLQDLPFPIGKIAEDTYWTWKVLLRASRIVYLNRCVYWYRVGLSDTLSNTWSEKRMYDEIGAREEKIAILASSDYDLTNHILIYKNRLQRVIAKLEEQNMQFTEIYRRMMEKLSLLP

SEQ ID NO: 1634 - protein, 3968 aa, Streptococcus pneumoniae
VLAKAEAEALVDADSDADVLADTEAEALVDAEAEALVEADAEALVLAEAEALVDAEADALVEAEAEALVDADADALVDADSEALVDADSDALVLAEAEALVDADSEALVLADSDALVLAEAEALVDAEADALVDAEADALVLAEAEALVDADSEALVDAETEALVDAEAEALVDAEADALVDADSDALVDADSDAEVLAEADALVDAETEALVEADSDAEVLAEADALVLAEAEALVDAEADALVDAETEALVEADSDAEVLAEADALVEADSEAEVLAEAEALVDADSDAEVLAEADALVDADSEALVDAEAEALVDAEADALVLAEAEALVDAEAEALVDAEAEALVLAEADALVDAEADALVDAEAEALVDAEAEALVDADSDALVDADSDAEVLAEADALVDADSEALVDAEAEALVDAEADALVLAEADVLALVDADSEADVLAEADALVDAEADALVDAEAEADVDADSDAEVLAEADALVEAEALVLAEAEALVDAETDALVDAEAEALVDAEADALVLAEADVLALVDADSEADVLAEADALVDAEADALVDAEADALVDAEADALVLAEADALVLAEADALVLAEADALVLAEADALVDADSEADVLAEADALVDAEADALVDAEAEALVLAEAEALVLAEADALVDAEADALVLAEADALVDAEAEALVLAEAEALVLAEADALVDAEADALVLADSDALVDAEADALVDAEADALVLAEADALVDADSEALVDAEADALVDAEAEALVLAEAEALVLAEAEALVDAEADALVDADSDALVDAEAEALVLAEALVLAEADALVDAEADALVLAEADALVDAEADALVLAEAEADVDADSEADVLAEAEALVDAEAEALVLAEAEALVNAEADVLAEADALVDADSEALVLAEADALVLAEAEALVDAEAEALVDAEADALVLAEADALVLAEAEADVDADSDALVLAEAEALVDAETEALVDAEAEALVLAEAEALVLAEAEALVDAEADALVLAEADALVDADSEALVDAETEALVDAEAEALVLAEAEALVLAEADALVDAEADALVDAEAEALVDAEADALVLAEADALVDAEAEALVDAEADALVLAEAEALVDADSDALVDAEADALVDAEAEALVDADSDADVLADTEAEALVDAEADALVLVDADVLALVDADVLADVLALVDADVLAEAEALVLAEAEALVDAEAEALVDADSDAEVLAEADALVLAEADALVDAEAEALVDAEAEALVDAEAEALVDADSDADVLAEADALVDAEADALVLAEADALVLAEADALVDADSEALVDAEAEALVDAEAEALVDAEAEALVDAEAEALVDAEAEADVDAEAEALVDADAEALVLAEADALVDADSDADVLAEAEALVDAEADALIDADSEADVLAEAEALVDAEADALVDAEAEALVLADAEALVDAEADALVDAEADALVDAEADALVDAEAEALVDAEADALVLAEAEALVDAEADALVDADSDAEVLVLAEAEALVDAEADALVDADSDAEILAEADALVDAEAEALVLADSDALVNAEADVLAEADALVDADSEALVLAEADALVLAEAEALVDAEAEALVDAEADALVLAEADALVLAEAEADVDADSDALVLAEAEALVDAETEALVDAEAEALVLAEAEALVLAEAEALVDAEADALVLAEADALVDADSEALVDAETEALVDAEAEALVLAEADALVDAEAEALVDADSDADVLADTEAEALVDAEADALVLVDADVLALVDADVLADVLALVDADVLAEAEALVLAEAEALVDAEAEALVDADSDAEVLAEADALVLAEADALVDAEAEALVDAEAEALVDAEAEALVDADSDADVLAEADALVDAEADALVLAEADALVLAEADALVDADSEALVDAEAEALVDAEAEALVDAEAEALVDAEAEALVDAEAEADVDAEAEALVDADAEALVLAEADALVDADSDADVLAEAEALVDAEADALIDADSEADVLAEAEALVDAEADALVDAEAEALVLADAEALVDAEADALVDAEADALVDAEADALVDAEAEALVDAEADALVLAEAEALVDAEADALVDADSDAEVLVLAEAEALVDAEADALVDADSDAEILAEADALVDAEAEALVLADSDALVNAEADVLAEADALVDADSEALVLAEADALVLAEAEALVDAEAEALVDAEADALVLAEADALVLAEAEADVDADSDALVLAEAEALVDAEADALVLAEADALVDADSEALVDAETEALVDAEAEALVLAEAEALVLAEADALVDAEADALVDAEAEALVDAEADALVLAEADALVDAEAEALVDAEADALVLAEAEALVDADSDALVDAEADALVDAEAEALVDADSDADVLADTEAEALVDAEADALVLVDADVLALVDADVLADVLALVDADVLAEAEALVLAEAEALVDAEAEALVDADSDAEVLAEADALVLAEADALVDAEAEALVDAEAEALVDAEAEALVDADSDADVLAEADALVDAEADALVLAEADALVLAEADALVDADSEALVDAEAEALVDAEAEALVDAEAEALVDAEAEALVDAEAEADVDAEAEALVDADAEALVLAEADALVDADSDADVLAEAEALVDAEADALIDADSEADVLAEAEALVDAEADALVDAEAEALVLADAEALVDAEADALVDAEADALVDAEADALVDAEAEALVDAEADALVLAEAEALVDAEADALVDADSDAEVLVLAEAEALVDAEADALVDADSDAEILAEADALVDAEAEALVLADSDALVDADSEALVDAETEALVDAEADALVLAEAEALVDAEAEALVLAEAEALVLAEADALVDAEAEALVDAEADALVLAEAEALVDADSDALVDAEADALVDAEAEALVDADSDADVLADTEAEALVDAEADALVLVDADVLALVDADVLADVLALVDADVLAEAEALVLAEAEALVDAEAEALVDADSDAEVLAEADALVLAEADALVDAEAEALVDAEAEALVDAEAEALVDADSDADVLAEADALVDAEADALVLAEADALVLAEADALVDADSEALVDAEAEALVDAEAEALVDAEAEALVDAEAEALVDAEAEADVDAEAEALVDADAEALVLAEADALVDADSDADVLAEAEALVDAEADALIDADSEADVLAEAEALVDAEADALVDAEAEALVLADAEALVDAEADALVDAEADALVDAEADALVDAEAEALVDAEADALVLAEAEALVDAEADALVDADSDAEVLVLAEAEALVDAEADALVDADSDAEILAEADALVDAEAEALVLADSDALVDADSEALVDAETEALVDAEADALVLAEAEALVDAEADALVDAEAEALVDADSDAEILAEADALVDAEAEALVDADSDAEILAEAEALVLAEVDALVEADSDADVLALVDADVLALVDADVLADVLVLVDADVLAEAEALVLAEADALVDAEAEALVDADSDAEVLAEADADALVDAEAEALVLADAEALVDAEAEALVDAEADALVDAEADALVDAEAEALVLADAEALVDAEAEALVLAEADALVDADSDALVEADSDAEVLAEAEALVDAEADALVDAEAEALVLAEAEADVDADSEADVLAEADALVDAEAEALVLAEADALVDAEADALVDAEADALVDAEAEALVLAEAEALVLAEADALVDAEADALVLADSDALVDAEADALVDAEADALVLAEADALVDADSEALVDAEADVLVDAEAEALVLAEAEALVLAEAEALVDAEADALVDADSDALVDAEAEALVLAEALVLAEADALVDAEADALVLAEAEALVDADSDAEVLAEAEALVDAEADALVDAEADALVLAEAEALVDAEADALVLADSDALVDAEAEALVDAEADALVLAETDALVDADSDAEVLAEAEALVDADVLADVLALVDADVLADVLALVDADVLADVLALVDADVLADVLALVDADVLAEVDALVDADVLADVLAEADALVDADSDAEAL

SEQ ID NO: 1635 - protein, 85 aa, Streptococcus pneumoniae
VFEVVDKTDEVSSKHCFEVADRTDEVSLKHCFEVADRTDEVSLKHCFEVADRTDEVSNHTYDKVKLTWFEEIFEEYHTKKPCSSR

SEQ ID NO: 1636 - protein, 263 aa, Streptococcus pneumoniae
MYQDLLRKIAEEKPNYNQEEIQWLLDHLGDPSPEIRDDLVFTSFARGIQEELFTQEQFHFIAEGVSSDGGLDKEIDKIGLPTLERSFRALIYATLLSDDANQQSIFYQRLKAEIRNVLLNQGLHYLSKEKDTTGFSSQYGWVHSFAHGADLLKEVVCHPDFPKNRVHEVFDILGQLFKRMSIRFTDDEDWRLARVIYEPILQGKLEQEQVASWIKTVDFPIEEREDFSKFSNFRSCLVEVYVQLDQRNSLQDELKEAIQSFQY

SEQ ID NO: 1637 - protein, 38 aa, Streptococcus pneumoniae; identical to SEQ ID NO: 576

SEQ ID NO: 1638 - protein, 124 aa, Streptococcus pneumoniae; identical to SEQ ID NO: 577

SEQ ID NO: 1639 - protein, 338 aa, Streptococcus pneumoniae
MNITYIVGNGLDLQYGLKTRYRDFYEFQNKVYISRTENEEKYSNFIYESLFSDKVNDYENWSDFELSIGKLTKDNDLISSSIEIKEKFIDDFSEVVDDLREYLRIQQEKNLEKGNAIDFISTLDDMRTSLPVINQPAIDKKYNENPHQDDIVNIVTLNYTHVIDKLYNGSAKSFRNQLRANLYNFYIEPPIHAHGTVDVCTVLGVSDEIQISNSLEEQKESLIKSLVLKNYRENMDVKNSDIIKNSDIIILYGVSLGETDRYIWSQIAERSISGSVPVIIYHYVPHFDPGNPIRAKRLYRNVEDKFIQNSGIDLELEKKLRDNLIVVIGKTIFDLIER

SEQ ID NO: 1640 - protein, 747 aa, Streptococcus pneumoniae
MNTLLTLRGKSFTQKSRNNGMGPITIPKKTIITLEHLKYLHFSLEETKTYWEKNNIIDGILISIYYNRIVAKSNRINGYFNVGGGNPFPNDTIVGAKFNDEKTKHIVTHYISRDALNKTITVLSKIIEVFEEHFDRAITCEMFSDSSTFASINFSEYGISKSKFQQYLRDSCFIENFGVEHTTVSDIQNSIVTFYDVHTDIFRLLNKLNIDISEANIMNQTTVLLDEKNIELLLSKAPYLVSMIVEDFSKLSVDDFSLDNNDLKINLPSPMNEPVVGVIDTLFDKRVYFNEWVEYHDFVSPDISKDSQDYKHGTAVTSLIVDGANLNPNLDDGCGNFRVRHFGVSLQSGFNSFTIIKQIKEIVSQNADIKVWNLSLGSNDEIRENFISAEGALLDEIQFENDVIFIIAGTNASVINGKRKRIGAPADSLNSIIVNSVDFNNQSVSYSREGIVLSFFVKPDVSYYGGGNGDFINVCEPLGLGRVAGTSFAAPFIARKMAYLIHIMGLSREEAKALLIDAAIPWNDKKTFTDLSLIGNGIVPIKMDDILSTPDDEIKFIVSDISRAYDTYNYDFPVPISSESYPYVAKATMCYFPNCSRKQGVDYTNTEMQLTFGRLKSDGIKSINKDNQHAEDTPGYVRENAARNIFRKWDNVKHIGESFTSRKRAKAILNPSNPQWGMSIKTIERLKSGDGQGVRFGVVVTLKELNGVNRIEDFIQQAELRGWLVNRLQVEAQVDLFNSLNEEIEFE

SEQ ID NO: 1641 - protein, 344 aa, Streptococcus pneumoniae; identical to SEQ ID NO: 998

SEQ ID NO: 1642 - protein, 38 aa, Streptococcus pneumoniae
MINSQVFEIRIFNSYYKDAIYYFKNINYSIFHIFSTHY

SEQ ID NO: 1643 - protein, 38 aa, Streptococcus pneumoniae
VGHRFDPCRGHLNTTGKALEPRFFCLNKIFFKFFRKLA

SEQ ID NO: 1644 - protein, 39 aa, Streptococcus pneumoniae; identical to SEQ ID NO: 435

SEQ ID NO: 1645 - protein, 49 aa, Streptococcus pneumoniae
VFGSYYRVIASIFFKEFWITEISSNQLIWQVCSSYNWILGNLFKVNPVI

SEQ ID NO: 1646 - protein, 50 aa, Streptococcus pneumoniae
VLPSHQVLTFSMSPVHRSPNTIIWIELIKEMVFSTKINKSIWIIDPTNLS

SEQ ID NO: 1647 - protein, 52 aa, Streptococcus pneumoniae
LLRFAIHSNLLFLKRFIFSIKDSAWRCLFISFFETFHFCFKNKSFYLNSFYH

SEQ ID NO: 1648 - protein, 95 aa, Streptococcus pneumoniae
LIVSLKTKSRKAKDMAESIQGWLAQFLVNLFKSITFDCGKEFSKWKDISNHHDSESFFANLECPRQRCLNEHSNRLLRCHDLPKQTDFNEVSQEF

SEQ ID NO: 1649 - protein, 256 aa, Streptococcus pneumoniae; identical to SEQ ID NO: 439

SEQ ID NO: 1650 - protein, 271 aa, Streptococcus pneumoniae; identical to SEQ ID NO: 440

SEQ ID NO: 1651 - protein, 491 aa, Streptococcus pneumoniae; identical to SEQ ID NO: 1002

SEQ ID NO: 1652 - protein, 451 aa, Streptococcus pneumoniae; identical to SEQ ID NO: 442

SEQ ID NO: 1653 - protein, 105 aa, Streptococcus pneumoniae
MNESNLESAMGLIMYGGEAKSNAMEAIQAAKKGDFSKANRRLADANAALLQAHKAQTEMLTREAQGEETSISLLMVHAQDHLMTSLTFVDLAKEVVEVYERFEKN

SEQ ID NO: 1654 - protein, 105 aa, Streptococcus pneumoniae; identical to SEQ ID NO: 444

SEQ ID NO: 1655 - protein, 298 aa, Streptococcus pneumoniae; identical to SEQ ID NO: 445

SEQ ID NO: 1656 - protein, 420 aa, Streptococcus pneumoniae
MEKLLQEKLLPVAARLGNNKALVSIRDGITLTIPLLLIGSLLMVIASFPIPGWEQYLGDIGVADYLWKGVDSSFGLLGLVASFGIAYFMARQYKVDGIPAGIVSLSSFITVTPFIRGEAGAGMPTAFMASKGLFVAMILGLINGYIYQWFINHNIQIKMPDGVPPAVSKSFSAIIPGAVTIVGWLIVYATLDKLSLPNLHEIAQVALGGPLGLLGNNVIGLLILIFLNSSFWFVGLHGGNVVNAVMKPLWLANLDANKVAYQTGETLPNIFTSVFMDNFVFIGGGGATIGLVLALGYLAHKKKASKQLKTLAPITVIPGLFNINEPAMFGVPIVLNILLLVPFILAPMFNLLVAWGAMASGLVPLTYTDPGWTMPPVISGLLATGSISGSLLQIVLIVLDVLLYLPFVIAIEKRFKLLED

SEQ ID NO: 1657 - protein, 392 aa, Streptococcus pneumoniae; identical to SEQ ID NO: 1008

SEQ ID NO: 1658 - protein, 135 aa, Streptococcus pneumoniae
MTIRFEEKVSTENAQFVCQWSNSLGKVFQEQWIGPRIPFPLTIQVFQDLEGILSIFEGQEFVGLIQKIRLEDSNLHIGRFFINPQKQGQGLGSQALRKFVSLAFENRDIDSISLNVFEANQRAQNLYQKEGFEIV

SEQ ID NO: 1659 - protein, 84 aa, Streptococcus pneumoniae; identical to SEQ ID NO: 448

SEQ ID NO: 1660 - protein, 53 aa, Streptococcus pneumoniae; identical to SEQ ID NO: 1010

SEQ ID NO: 1661 - protein, 39 aa, Streptococcus pneumoniae
VLTLMNHFIKEIQGIPINHLTILIENSIFKLNLKNWIIG

SEQ ID NO: 1662 - protein, 47 aa, Streptococcus pneumoniae
VDRTDEVSSKHCFEVADRTDEVSNHTYDKATLTRFEEFFEEYKGVPR

SEQ ID NO: 1663 - protein, 37 aa, Streptococcus pneumoniae; identical to SEQ ID NO: 453

SEQ ID NO: 1664 - protein, 49 aa, Streptococcus pneumoniae
LHLGKSILSLPVKGKDLEFLVHLFVINHWIGFPSRTSTFCRCKVLNSME

SEQ ID NO: 1665 - protein, 56 aa, Streptococcus pneumoniae; identical to SEQ ID NO: 455

SEQ ID NO: 1666 - protein, 134 aa, Streptococcus pneumoniae
LTDDGVLILVVDAGWRGNSCLQEQGCHHFRAILLCITWHFRSCTDKGHLTFKDIDQLRQFVQTDTSDEISNLGNTAIVSRSHQTSFFIRIRHHGTELPNLEPTVVLGHTLLLVNHWPLAIQLDPNAQDEKDGRS

SEQ ID NO: 1667 - protein, 37 aa, Streptococcus pneumoniae
MLKMRKMGEVRTSKTKAKTQSKQRLKISEPFLLETSW

SEQ ID NO: 1668 - protein, 79 aa, Streptococcus pneumoniae; identical to SEQ ID NO: 1016

SEQ ID NO: 1669 - protein, 496 aa, Streptococcus pneumoniae
MDQNLFNYNDEDIDSVIEYSHKLLNRKFSDVMEEYNRSLYKSYDDYNDRVVSEVQDKAISMKSKGQYGNYIEKYFYGYQPNSDSEADFEKIGVELKVTPFKINKNGTLSAKERLVLTILNYMEENLEDFYSTHLWKKCAKILLLFYNGLIPNQTMKDYVIEKIFLYEWFEEDMAVILEDYQKITDKIKNGKAHELSESDGNYLSTCTKGAGKGKDLRQQPFSHELAKQRAWELKSSYMTYLINHKIFNQSDQESVLANFRGEKKSFTEVIAEKILSYKGFSEQELYDRFEVNSKAKGKNSTLIRKILGLTGDLDKTKEFQKANMNLRVIRVDKNNLPKEDSPFKTYCFKELAATDSWESSHVYNEIYNKRFLFVIFKEIEPKLFVLDSIKFWGFQDRQLEEIQRVWQETRQIISDGVKLTQNGNKVSTNFPQSKINKILFTKLHATNTYYEIDKGKFVGKGSLSDTDELPDGRRITKHSFWMPKKFIKEILDGNWD

SEQ ID NO: 1670 - protein, 421 aa, Streptococcus pneumoniae
MKVLELFAGVGGFRIGLENADKQLFKTKWANQWEPSRKSQDAFEVYDYHFPNSKNINISISDITDEQFSKMDADMIVGGFPCQDYSVARSKKNEKGIEGKKGVLFWEIIRATEIIKPKYLILENVDRLLKAPSKQRGRDFAIMLTAFNNLGYSVEWRVINAAEYGRSQRRRRVFFFVYRNDTVFAQKIDNLYEKNEEIFEDNRYDDYIFNQGLFAKQFPIKPIAVKNRHVFYELPNDIVEVSDTFTGTVWNTGIMRRGKYYSIDTEPNYNGNPITLGEILQDESEVPEKYFLTDQSKLEKFQYLRGPKKIERTSSDGHQYIYSEGGMSPYDDLNLPGRTMLTSEGTVNRSTHLLFVNNKYRLITPIEAERLQDFPDDWTAKKKLSDDSIVEVSDKMRMFFMGNALVTEIVKEIAKFIKEID

SEQ ID NO: 1671 - protein, 43 aa, Streptococcus pneumoniae
MDTFSFNGQYIVEFSCLKVVDRGLECHPIKSQRDNHQTTDLVT

SEQ ID NO: 1672 - protein, 53 aa, Streptococcus pneumoniae; identical to SEQ ID NO: 461

SEQ ID NO: 1673 - protein, 117 aa, Streptococcus pneumoniae; identical to SEQ ID NO: 1017

SEQ ID NO: 1674 - protein, 38 aa, Streptococcus pneumoniae
MLRQFRLGFFDVRMTECHLKWKERENFHDFLKFYCKDS

SEQ ID NO: 1675 - protein, 69 aa, Streptococcus pneumoniae; identical to SEQ ID NO: 463

SEQ ID NO: 1676 - protein, 90 aa, Streptococcus pneumoniae; identical to SEQ ID NO: 1019

SEQ ID NO: 1677 - protein, 44 aa, Streptococcus pneumoniae; identical to SEQ ID NO: 466

SEQ ID NO: 1678 - protein, 37 aa, Streptococcus pneumoniae; identical to SEQ ID NO: 467

SEQ ID NO: 1679 - protein, 101 aa, Streptococcus pneumoniae
LSLDFFPDDRSRSVTSNDNHFDILGQEKVDQLPSIFTNLLSRTGAIGRPRRISNIDDFFMGKLAHELAHNGQAPDTRIQKTNWSIIHTVFFLVFFLIDRSL

SEQ ID NO: 1680 - protein, 38 aa, Streptococcus pneumoniae
VSYGSHIFFASNCLKQIFGFLFKFSHLILLILVKASLI

SEQ ID NO: 1681 - protein, 267 aa, Streptococcus pneumoniae
MTSLLTLENIHKTFEAGTVNENHVLKGLDLEVEEGDFISVIGGNGAGKSTLMNILAGNLSVDEGDLLLAGKSIKNLSVRKRAKDIARVFQDPKMGTASRLTIEENMAIALRRGQKRGLGWGVKEKDRIQFQEALKELNIGLENRLKVDTQYLSGGQRQALTLVMTDLMKPKLLLLDEHTAALDPKTSQMVMDLTQKIVEHHQWTTLMITHDMNHAIEYGNRLIMLYQGKIVVDVKGEEKKHLTVEDLMHLFQKNSGQSLVSDELVLG

SEQ ID NO: 1682 - protein, 297 aa, Streptococcus pneumoniae
MNFVLSSLSEGLLWSIVAIGDYLTFRILDIADMTAEGAFPLGAAVVVSQIQAGANPWLATLLALLAGMVAGLVSGMLHTKMKIPALLTGIVTLTGLYSINIKIMGSVPNLSLGDSATVFKQLASLGLTNEGAVFSLSLVCFLLVCLVLTLLMKTEIGLVLRSTGDNIPMSEANGVNVDTMKIVGYMISNGLIALCGSLFAQNDGFSDVTSGTGTIVVGLSSVIIAEVLIHDLTIGGRLLSIGIGAIVYRLIILNIYEIPNLDQNLVRLFNAILLALVLFAPELQKRLKIRGLKLRNE

SEQ ID NO: 1683 - protein, 107 aa, Streptococcus pneumoniae
MAEVDMVFVPTDNIILSTMETVKQVSIKHKVPVFGGSTEMIAVGGLYNYGTNYEELGRQTARMLIRVLKGEEPENIAVELPEKLELHTNQEMADALGIDISKLEGKE

SEQ ID NO: 1684 - protein, 128 aa, Streptococcus pneumoniae
VDELAKQGYVEGENIEIDLQNAQGEQRNLKTISQQLAESSDVVLAIARPSAQSLANTTQTTPVIFSAVTDPVSAKLVESREHPGGNVTGTSDQSSDAISTQINLIKKVLLKAKTIGILYTQSEPNSVV

SEQ ID NO: 1685 - protein, 42 aa, Streptococcus pneumoniae
MQTDQRSQEEPHYQEGASDFRTTFIMKLLLRKDKTKNRLDTI

SEQ ID NO: 1686 - protein, 42 aa, Streptococcus pneumoniae
MLPILSPFSSPVNNISEFFKIFRKFFQEAFKVFQISPTKKVL

SEQ ID NO: 1687 - protein, 39 aa, Streptococcus pneumoniae; identical to SEQ ID NO: 573

SEQ ID NO: 1688 - protein, 86 aa, Streptococcus pneumoniae; identical to SEQ ID NO: 572

SEQ ID NO: 1689 - protein, 55 aa, Streptococcus pneumoniae
MKIKEQTRKLAAGCSKHCFEVVDETDEVSNHTYGKVKLTWFEEIFEEYKKSSWNL

SEQ ID NO: 1690 - protein, 37 aa, Streptococcus pneumoniae; identical to SEQ ID NO: 452

SEQ ID NO: 1691 - protein, 71 aa, Streptococcus pneumoniae
MSIVKSHSFSISLGIFNSFWNNIHTSECFNFLCKGKSNRSNSTISVNQMVFFINIQRFYCFAIEDFCLLRI

SEQ ID NO: 1692 - protein, 44 aa, Streptococcus pneumoniae; identical to SEQ ID NO: 471

SEQ ID NO: 1693 - protein, 37 aa, Streptococcus pneumoniae; identical to SEQ ID NO: 1517

SEQ ID NO: 1694 - protein, 131 aa, Streptococcus pneumoniae
MYNKVILIGRLTSTPELHKTNNDKSVARATIAVNRRYKDQNGEREVDFVNMVLWGRLAETLASYATKGSLISVDGELRTRRFEKNGQMNYVTEVLVTGFQLLESRAQRAMRENNAGQDLADLVLEEEELPF

SEQ ID NO: 1695 - protein, 121 aa, Streptococcus pneumoniae
MQFTRTAHHTKTLFTTKFTWENEIPFWHHSSRKRDNGFQPHTRIGSSCNDLYSLITCDCNLADVEVVTIWMGYHLNNFTDNKLRFLIINNFFCKTFRLQLLVQTSDLLICQKDLTALCSFK

SEQ ID NO: 1696 - protein, 47 aa, Streptococcus pneumoniae
MILDSFFAFNCSGTMKVSTWVYDKGEWYYVSSSGSMIANDWVKDNGK

SEQ ID NO: 1697 - protein, 65 aa, Streptococcus pneumoniae
MCTSINKKKKAVKPSFDLFFCFIFCKLTIVQVSVEATLRHQFLIVALLDDISIFHDQDQVCISDG

SEQ ID NO: 1698 - protein, 100 aa, Streptococcus pneumoniae
LHLRTCFVRQTNKLSPLINRTRLQFHQTILHYTLNQITSNRLGNIEFLIDIFNQDQVLVFLAIIQKMHNLTLRPTHKFNAATFGFLLHHQVNLMTKTLKD

SEQ ID NO: 1699 - protein, 65 aa, Streptococcus pneumoniae
MLEIWKYRPFVSEFWNDFKNNHDKQFVDSISLYLTLKDDDDPRIEEESEALENMILQYLGEDDAS

SEQ ID NO: 1700 - protein, 43 aa, Streptococcus pneumoniae; identical to SEQ ID NO: 483

SEQ ID NO: 1701 - protein, 37 aa, Streptococcus pneumoniae
LTDFHDFKFIFFENLFKSRQLYLQSQNTVLSNLWLAT

SEQ ID NO: 1702 - protein, 579 aa, Streptococcus pneumoniae
MKIMKKKYWTLAILFFCLFNNSVTAQEIPKNLDGNITHTQTSESFSESDEKQVDYSNKNQEEVDQNKFRIQIDKTELFVTTDKHLEKNCCKLELEPQINNDIVNSESNNLLGEDNLDNKIKENVSHLDNRGGNIEHDKDNLESSIVRKYEWDIDKVTGGGESYKLYSKSNSKVSIAILDSGVDLQNTGLLKNLSNHSKNYVPNKGYLGKEEGEEGIISDIQDRLGHGTAVVAQIVGDDNINGVNPHVNINVYRIFGKSSASPDWIVKAIFDAVDDGNDIINLSTGQYLMIDGEYEDGTNDFETFLKYKKAIDYANQKGVIIVAALGNDSLNVSNQSDLLKLISSRKKVRKPGLVVDVPSYFSSTISVGGIDRLGNLSDFSNKGDSDAIYAPAGSTLSLSELGLNNFINAEKYKEDWIFSATLGGYTYLYGNSFAAPKVSGAIAMIIDKYKLKDQPYNYMFVKKILEETLPVKNGIKVLNIPNVLRYDLNMLQLEYKNEQSWDSFIDNVNLIELEERIQTTIGIKQINTHNIITIAREGYSQNYLPNTSENTYNSLQVSLVGVLLLFISMVNILWAKKSK

SEQ ID NO: 1703 - protein, 124 aa, Streptococcus pneumoniae
VLKWCILRINHHISRKVDNFLEGTRAHIKGQAHTAWNPLEVPDVRYRSFQFDMSHTLTTNFRTRYFNPTAVTNNSSVTNAFVLTTSTFPVFCRTKDHFIKESFTFWFQGTIIDCFRFFDFSIRP

SEQ ID NO: 1704 - protein, 39 aa, Streptococcus pneumoniae; identical to SEQ ID NO: 489

SEQ ID NO: 1705 - protein, 54 aa, Streptococcus pneumoniae; identical to SEQ ID NO: 490

SEQ ID NO: 1706 - protein, 43 aa, Streptococcus pneumoniae
VTDENTRKVRLLVAFFSIVIGYILSSFFISLYHLWQEALRGLL

SEQ ID NO: 1707 - protein, 38 aa, Streptococcus pneumoniae
LHVELIDSHKFNIGRTTCSLLSTTNICKRCQPSINHMS

SEQ ID NO: 1708 - protein, 56 aa, Streptococcus pneumoniae
MLNTNRNELIGTSFLIFCVIYFKDLANIFRTTWNLYIIRQGHYKCQESHNQGRNDV

SEQ ID NO: 1709 - protein, 69 aa, Streptococcus pneumoniae
VNKPILSDIDCHLTNSINLFLPDTQTGNLFWKFNGLIRLAHNHNIFRKKLSLSHFFNICYDLFLGIGRV

SEQ ID NO: 1710 - protein, 39 aa, Streptococcus pneumoniae
LKFSNFLGHLDIFSHDGLSLTVSLHQNSTGHATRYCFDR

SEQ ID NO: 1711 - protein, 52 aa, Streptococcus pneumoniae; identical to SEQ ID NO: 1039

SEQ ID NO: 1712 - protein, 175 aa, Streptococcus pneumoniae; identical to SEQ ID NO: 494

SEQ ID NO: 1713 - protein, 49 aa, Streptococcus pneumoniae; identical to SEQ ID NO: 1043

SEQ ID NO: 1714 - protein, 54 aa, Streptococcus pneumoniae; identical to SEQ ID NO: 496

SEQ ID NO: 1715 - protein, 41 aa, Streptococcus pneumoniae; identical to SEQ ID NO: 497

SEQ ID NO: 1716 - protein, 37 aa, Streptococcus pneumoniae; identical to SEQ ID NO: 498

SEQ ID NO: 1717 - protein, 98 aa, Streptococcus pneumoniae; identical to SEQ ID NO: 1047

SEQ ID NO: 1718 - protein, 37 aa, Streptococcus pneumoniae; identical to SEQ ID NO: 452

SEQ ID NO: 1719 - protein, 45 aa, Streptococcus pneumoniae
MKELLNKAFFNKNKASLSKEVLLELQGKRLPVNLFLSKSLFQASL

SEQ ID NO: 1720 - protein, 78 aa, Streptococcus pneumoniae
MMTKIKLTIDIIMPCRHITNIWIYKEEGRVNLFFYSQIFFDAIDERIIHNFNSKYHLSFFSPVTGFSQIFDKTLACLG

SEQ ID NO: 1721 - protein, 43 aa, Streptococcus pneumoniae; identical to SEQ ID NO: 1053

SEQ ID NO: 1722 - protein, 126 aa, Streptococcus pneumoniae
MLEQARLKVEQQAIKNIQFLEQDLPKNPLEKEFDCLAVSRVLHHMPDLDAALSLFHQHLKEDGKLIIADFTRTEANHHGFDLAELENKLIEHGFSSVHSQILYSAEDLFQGNHSEFFLIVAQKSLA

SEQ ID NO: 1723 - protein, 60 aa, Streptococcus pneumoniae
MKHDFNHKAETFDSPKNIFLANLVCQAAEKQIDLLSDKEILDFGGGTGLLALPLTPSQAG

SEQ ID NO: 1724 - protein, 148 aa, Streptococcus pneumoniae
VWKKKKVKAGVLLYAVTIAAIFSLLLQFYLNRQIAHYQDYALNKEKLVAFAMAKRTKDKAEQESGEQVFNLGQVSYQNKKTSLVTTVRTSKSQYEFLFPSVKIKEEKRDKKEEVATDSSEKAEKKNQKRSLKRKRIPSQFNYNALNPE

SEQ ID NO: 1725 - protein, 65 aa, Streptococcus pneumoniae; identical to SEQ ID NO: 511

SEQ ID NO: 1726 - protein, 135 aa, Streptococcus pneumoniae
MRIRNSPFDHILQTIFEFEDRTCQVTCRFEACSSICNDNWEFSQHIISVFQSPSCHTVCDKSDVFCSFLFDKNFASLWIYVVTITDQLCIGMWQLVHGSNHTQFTVSQPTHSIVGMHPNTRSSIDCFFGFIKSRV

SEQ ID NO: 1727 - protein, 98 aa, Streptococcus pneumoniae; identical to SEQ ID NO: 1060

SEQ ID NO: 1728 - protein, 95 aa, Streptococcus pneumoniae
MQCTFNVVVHHIYTCISMNMSIHKTWGNAITCIVNHLSPFRNLLYMFPKLAVHKFQVTTSTNSVWVEKLIRFNIVRHNVNLLKRLILQFIMSITL

SEQ ID NO: 1729 - protein, 370 aa, Streptococcus pneumoniae
MKKRMLLASTVALSFAPVLATQAEEVLWTARSVEQIQNDLTKTDNKTSYTVQYGDTLSTIAEALGVDVTVLANLNKITNMDLIFPETVLTTTVNEAEEVTEVEIQTPQADSSEEVTTATADLTTNQVTVDDQTVQVADLSQPIAEVTKTVIASEEVAPSTGTSVPEEQTTETTRPVEEATPQETTPAEKQETQASPQAASAVEVTTTSSEAKEVASSNGATAAVSTYQPEETKIISTTYEAPAAPDYAGLAVAKSENAGLQPQTAAFKEEIANLFGITSFSGYRPGDSGDHGKGLAIDFMVPERSELGDKIAEYAIQNMASRGISYIIWKQRFYAPFDSKYGPANTWNPMPDRGSVTENHYDHVHVSMNG

SEQ ID NO: 1730 - protein, 182 aa, Streptococcus pneumoniae
  misc_feature 176...177: Xaa is any amino acid
VLAEADALVDAEAEALVDAEADALVLAEAEALVDADSDALVDAEADALVDAEAEALVDADSDADVLADTEAEALVDAEADALVLVDADVLALVDADVLADVLALVDADVLAEAEALVLAEAEALVDAEAEALVDADSDAEVLAEADALVLAEADALVDAEAEALVDAEAEALVDAXXHSFIN

SEQ ID NO: 1731 - protein, 103 aa, Streptococcus pneumoniae
VRRLQHRQVLQLQRQPVRRLQRQPVRQPQQAPVLRLQQVLAPQPQHQQVLRSQRQPVPLNPHQPVHRLQQVLAPQLQHQRVLQLSMNQCVGIRINQCIGFSKY

SEQ ID NO: 1732 - protein, 110 aa, Streptococcus pneumoniae
  misc_feature 102...104: Xaa is any amino acid
VRRNPHQPVHRLQQVLVHQLQHQRVLRLQQAPVRLNPHQRLPQPQQVPVRQLQQVLVHQLPHQQVLQLQRQPAPQPQQVPVRQLQQAQAPLSQRQPVRQLQXXXFHSLIN

SEQ ID NO: 1733 - protein, 43 aa, Streptococcus pneumoniae; identical to SEQ ID NO: 1706

SEQ ID NO: 1734 - protein, 269 aa, Streptococcus pneumoniae
  misc_feature 3...4: Xaa is any amino acid
MNXXALVDAEAEADVDAEAEALVDADAEALVLAEADALVDADSDADVLAEAEALVDAEADALIDADSEADVLAEAEALVDAEADALVDAEAEALVLADAEALVDAEADALVDAEADALVDAEADALVDAEAEALVDAEADALVLAEAEALVDAEADALVDADSDAEVLVLAEAEALVDAEADALVDADSDAEILAEADALVDAEAEALVLADSDALVNAEADVLAEADALVDADSEALVLAEADALVLAEAEALVDAEAEGTGMRKLIH

SEQ ID NO: 1735 - protein, 231 aa, Streptococcus pneumoniae
  misc_feature 225...226: Xaa is any amino acid
VLALVDADVLADVLALVDADVLAEAEALVLAEAEALVDAEAEALVDADSDAEVLAEADALVLAEADALVDAEAEALVDAEAEALVDAEAEALVDADSDADVLAEADALVDAEADALVLAEADALVLAEADALVDADSEALVDAEAEALVDAEAEALVDAEAEALVDAEAEALVDAEAEADVDAEAEALVDADAEALVLAEADALVDADSNADVLAEAEALVDAEXXIPFIN

SEQ ID NO: 1736 - protein, 40 aa, Streptococcus pneumoniae
MKIKEQTRKLAVGCLKQCFEVVDRTDEVSSKYCFEVADGS

SEQ ID NO: 1737 - protein, 48 aa, Streptococcus pneumoniae
LLGSFFSWTTKELMGIIFFNNFPTVHKNNMIGYISSKTYLIKLIKNSI

SEQ ID NO: 1738 - protein, 58 aa, Streptococcus pneumoniae; identical to SEQ ID NO: 147

SEQ ID NO: 1739 - protein, 80 aa, Streptococcus pneumoniae; identical to SEQ ID NO: 146

SEQ ID NO: 1740 - protein, 40 aa, Streptococcus pneumoniae
MTTGWFQVNGRWYYAYSSGALAVNTTVDGYSVNYNGEWAQ

SEQ ID NO: 1741 - protein, 165 aa, Streptococcus pneumoniae
MAFTTEELLNLGLTEEQAKSVFALRGKELNEDKSALETIKQERDSLKSQLQKAEEQVEHLKSLENISAEQKDAIDKLQAEYDKYKNEAAAELAQTKKVSAISLALKDTNAFNPDKLMKFIDVDAIQIDDNGKPQIDEVINGIKESDPHLFQAEESKPSPNIFPLR

SEQ ID NO: 1742 - protein, 173 aa, Streptococcus pneumoniae
MGSSGEMRTRPAEELGVDTFYYSMKAMARPACSPLQGQIVTKGTGREIDGITIYSLLDYGYGTAAGCLGIHCGHYLTPFIVGVHELPNLPDYLKNLTPEQAEENARIEAGQRGLERLIKTHKERLHYAHTLQDDKMIQAERLKVRGYQTKIRNLINQHDFLTRDYRREKLYIS

SEQ ID NO: 1743 - DNA, 549 bp, Streptococcus pneumoniae
atgctgcttaaaaagaaacataagaaaccagtaacacaagtcaatcgggataagtctccgccgagtgtctggggagatatcctttacttagtcagtaaacttctgatggttggatttgtactagccatcctttactttttcgtctttggattattaagatacaatgacgatggcatgaagcccgccttaaaagatggcgacttggtcgtctattataggttggataaacgctattcgattggtgatttgctagtctatagttataaaggtaaggaaagagtggcgcgtgtcatagcaaccgaaggaagtacaatcgatataaacgaaaatggtctcatcatcaacggttctcctcaacaagagcaagatatctacaaagaaacgctgctctataaggaaggggcaaccttcccgatgaaagtcccagcaggacaactttttgtcctcggggacaatcgaacaacggctgtagacagtcgtgcttttggaaccatccctatacaggatactcaaggcaaagttgtaacagtcattagaagacgaggcttt

SEQ ID NO: 1744 - DNA, 1019 bp, Streptococcus pneumoniae
atgatgaaaaccaagcgtgagaaaccaaaaaagagtctgtctaggcgtctcgttcttgctgtggatggggtgatcaatcacttgctgctcatttttgcagctttgatctttctctttggtttctacgccctttgggattccaaccaagtctactccttagcttcgtcaagtgagtacgaagcttatcgacctgtcacgacgcaacaggatgagctggccagtttttcaggcttcagcaaactccaagaactcaatcccgaagtcctcggttggatcaatgtctatggcaccaatatcgactatcccttagtccaagccaaggacaatgaaaagtatctcaacaaggactccaaaggtgagtttgcagcgacaggcgctatctttctcgatgcacgaaataatcctaagttcgaagactttaataccattatctacgggcaccacgtagaaaatggggtcatgtttggtgatgtggctaagtttgctgatcaggaattttttgaccagcatcgttacggtagtatatactacaatggtgtggaaaaagggctcgagatctttgagatgttggaggttgatgcctatgactttaacatctatgatccaggaatacagggtgaggaccgccagcaggcctatctagaccacctgctctcagtcgccatgcacaagcgggatatctcactctcaccgagtgatcgtatcatcctactcagtacctgttttctcgatgtgaccaatggtcgtcatatcgtagtcgcaaagattacagacaccgtccctaaaaatactttccatacaaaaaaatcaaaaccatttccatacagtgtctttgatgactcgtctcttggacgtttcctctcatcaatcccactatggatttggtaccttatcttgtttgtattgttcttgctcttgattttcttactccttgtcctctacttgatcctacgtcgtagaagagagagtaaaaaaaatgcaagaagcagacccttttactgactaagggtgaatagaaa

SEQ ID NO: 1745 - DNA, 606 bp, Streptococcus pneumoniae
atgacggttcaaaaaagagcgcgatttaaaaacgtatttctggtattcttctgtgtttttgtagctctttttagttggcagagagtagtagaagcaagtgactatgatcactataatcctattgaaaaggatgcttcgagcacaggttttgaaaccctacagcacttgaacaaagatgtttgcggttggattagccttgatgggaccaaggtagactatccgcttctacaaagtcaggataatgtcaaataccttgaccgcaatgcctttggcgattatacgataatgggatcaatttttctcgactatcgctttaatcccaactttactgattttaatacgatcatctacggacactctatggcttcaggggctatgttcggtgagattaagaaatttgctgataaggaattcttcgaccagcatcgctacggttctatctactacaatggtcgagaacgtggtcttgaaatttttgggattttagaagtggatgcctatgacacggagatttatcgaaccttgagttccaaggatgaggaacaccaggcttactatcaatatctgctaagtaaagccaagtacaagcgagatgtttccttaaca
